United States Patent Application Publication US 2022/0290142 A1 - sequence listing, part 14

SEQ ID NO: 15307 - DNA, 80009 bp, Homo sapiens
gcggagccagctgagcccgagcccagcccgcgcccgcgccgccatgcccctggccttctgcggcagcgagaaccactcggccgcctaccgggtggaccagggggtcctcaacaacggctgctttgtggacgcgctcaacgtggtgccgcacgtcttcctactcttcatcaccttccccatcctcttcattggtgagtgcgcgcagcgagccgcggaggaggggacgggagagcagggagggaggaggaggcgctgcgcgccgcaccgctcggcgtccccttccggcccgcgaccgccgtccgcctcgttcccggggtcccctgccctgtgtcctgcccgccggtccccgcactcgcacaccagctcatcccttcactcccccggtgcccccgatcccgcgccaaacacagcggacgtttgtgacccatgggatcaccaagttttgcttctgcagggccaagagctgggatggggaaaagggaaagaggaggtctcagcacgcagtgggaaactggagaggggtcgggcctcaccctccgtggcgcagcttagggagccgggtcacccctcccgcaaggcagcctccctgtcagccgcagctgggcctagggaagagggaagcctgtgctttggagtctgggatggaggcccagctaacccctatgctttcaccgggctgagccgcgcagtggtccgtgatctctgacagtcccaggcccgcgccctgggcgaggagaggcgagagctagggacttggattcccttcccccgccaccccacccgggcatgtgtctccagagcgcaacttctcaggctctgcgcaaagtagctccgactcgccgacgcagcgaccccggcgcccttgcttgcaaagttgggcgccacggccgggacaatcgtgcgtgcctctccactgaggtcccccccatctctctccaagaccttgactcttccagaccagtcaagtctatcaactcatagggtgtcccctgcatccccaaaacgtgttcattcactttaagaaaacaagcaaatcttaaaattcatatacagctttggggaagaaaggaaagattgtcacaaaattagatttacaagaggttgctgcagaagcagagttgctagttattaacaaagacagttagatagaaatagaaataaaacatacaaaatatgtgctcatatgtgcatcaaaaatcaaaaaagaacagcatttacacttctgttctcagccaaacggtttattaacctgatgacttgtcacacaagaagttagtatgtataatggggtaccttggcagggcacagtggcttacatctgtaatctcagcattttggtgggctgtgacaggaagactgcttgagtccaggagttcgagaccagcctgggcaacatagtgagaccccccccgccctttctacaaaaaattaaaaattagctgagcatggtgatgtgcgcctgtagtcccagctactcaggaggctgaggcgggaggatcacttgagcctaggagatcaaggctgtagtgagccgtgatcgtggcactgcactccagcagaggcaacagagcaagaccctgtctcagtaaaaaggtgtggtgggggaggtaccagcataggaccaggctgaatgagttggacgtttagtttgtgtgtaccagccttggggatcctcatgtgtaggtgtcaccctcaccatggacccaatgcccaagcacctttctggggttcatgcaccctcttcctcctccaagtgggcaggcatcctgcctctgactgtctctccctgcaggatggggaagtcagagctccaaggtgcacatccaccacagcacatggcttcatttccctgggcacaacctgcggtggatcctgaccttcatgctgctcttcgtcctggtgtgtgagattgcagagggcatcctgtctgatgggtgagtgactgtctgaggactcaggaaagtgaatctgctccagggtacttcctgaaaggcccaaggagatcctagctcacctatattccacaagcccatgtcttttgttactacatccagcagctcagtgtcttctatgtgccaacctctctgagctgggcactggacgcaagtgagtcccaggccctgccatcagtccaggagagcagagggaacacggacctgcatgccaagtcccagtgaaataatgctagagcctattagaatgccacaactccagtgaaaaatgtctggcctcttctacaacctgccggagttaccttcttggaaaaaaaaaaaaatctaaccatgccacccactcttgcataagacctttccttggttctcagctgttttgaagatgtggtctcagatcctcagcccaccattcaaggtcttcacagtcagccccacctatctctggcctcattccccatgcccaccttccgtttgggcctcacagcacactcctcacacctctgctacagcacagatcacactgtatgttaaagtttatgtctatttgcaaaactgtcttcagagtcagaaaggcctaagagttagaatctgagtcttgttcatctttgtgttcacagtgcaaggcatgtgataaacataaacattattcagtccataaacatttattgggtccttaggagaatgaatgaaaccatgttacaaataagtactctgggaggtgagaggaaggcagaattgggcaagctccatggttgagagggctttggagcggagtctggaagggtgactaggcttcagacacacagaggaggaaggagagagagaactggtggtgcctgagggaagggaaaaggcaccaaagagaaaagcaggtagggctagggagcagcgcaggggctggagcattaaacacaggctggggagcgatggaggctgaggctgggaacccaggttggggcatctcaggaggactgtgaatcccagcctgcatgtttgggtcggatttggtcagcagtttggaacagaagagagatgtcatcagcataacacttttaggtgggaacctgaggtgttcagcgcaggctggaggcagggagaatctagaggtataatagaagcaggacttagcattgactgcagtagtctaggtgagcaataactgcagacagaaatggtgtgtcagcagtcagggacagaagaggagcgggagcagccatctcactaaggaagaatccagtaaccagcaaggatgagagactgccaggagagggagtggtggaggagagggatatttggcttgagtatctgaggtccagcgccccctgagctggaatcagattatacccagactgcactcctgcagtgctgcctggctcctgtagttggatggcaggggataggctccctcatcctccctcccgttccccaccttcccttccccaatgtccctgcatcctggcttcagcagtgatctctaaaatacctgcttgacttggaggcagcagctctgcctgcttattaaagtccctagaccagcaagaagaccagaaggcatactgctacacaagcacgtgacaagtccgcctccacccccacccctacaccccttccaaagtagcacaaatgccacagtgagccctcagatgggaaatactcaccagatggtgacagagaaagacacctccgcccttggagaaggaagacctgggtcttcagtgagcactgctgctgtgtaccagctatgggactttgcacaagtcattcaggctttctgggcctcataagcatttataaacatacgataaaacattttagttgccaacttaaaaatgtgtgagaaagtataaggtgtttcaaaattatttcaaggagtaaagaggcaagagttttgaagatccctgggcagggtgttggctgttcccagtgtggccattcatgactgctctctggccttatgaaacaagcatcatagtccctggcttgcctgcttcatggggctgtggagggtgaaattcgagcatggacagggtgcagagcccggagtggcagagcactgggtagactgtgtattcccagaatgtgggaaactggaatgaatcggtccagggatgccctcctgctggctgtcagcagcccctcctgtgtgtggctgtactgcttcagctcagtgcaaagggccatctcctccccagggcacagatcagctcaagctgagtaattgtcatctggtctttgtgagctcctacccccaggcctgagtgaggggcaggaaaagagcagacaggagaagtcacagacccttgtgatacctccagtctaatccagcctgggttttcagagctgtctggaaatttagggggcaggtgggagggggctgattaaggcagccctgatttgatttagagtgagcctcatttagtgactaattaagccatcttaaacctgtagggcttcccctcttcctttgggtattatttctttctgtgatgttctgaattcagaacaatcaaaacagtataagttagtgaagaagatattttttaataactacaatattttcccagaccaccatacactggataaagcctgtatataaaactttacctaatttcttaactaattgaatgtgtattatttaacaaagcagctaaaaactattctatgaagccatgtcatgaaatatttagttcaattatggttaatcctcatcttatttcgtcttataaaattttaacatttctacctcctattgcaaaaaaaagcatttatatcagcatataataaaacatgtctagatgtcagcttaaaaatgtgtgagagagtagagggtgtttcaaaattatttcaaggagtaaagaggcaagagttttgaagatccccaggaagggtgttggctgtgcccagtgttgccattcatgactgctctctggccttgtctgtcttgtaccttctatattagtttgaagaccttttttggagaatattcactaaagaatatcaatatctaccatttcattaaaaaagaaatgtggagtttgccttttcaagttggtttgatgcttattgatgttttcagggacccagcctcttcccatctttccataccatcctgtgtgtgtgtgtcagcctatcttccccatggtcacaaggtggctgcctagctccgggtattgcttagcatgagcagagagggcatgctgccgacatgcctctcctttatgacagagatcattctttctttgacatctcactggccagaatacgtggaccaacactggcaaaggagtatggaattgcatggctgcttaaaccaatcaccatccattccctggggctgggtatattgctgctggagcaaacctgtggtcctcctggcacagaataaggggaagatactctttggtggacagcccacattgcctctacacttgcacctcagtcccaccagacccactgaggtcacaggatagctctcctcatgtccttcctccttctctgttgaactcttatgtatccttcaaagtccagcctggtgccacctcctctgggaagctgtccttggttgcccaccccctcctttgtgctctctcagtctctgtccatcggcagtatcacttccctagcctgctgactccaacagttagctctgagcatggcagccccctccataccatcagcttctcaagggcagggacccttggcacactggatagaagtagcctggtgggcaacagcagcactgaggcagcaagctgtagcaggccatctgggaatggagtgggtaccacagggctggagcagaaagggcaggctgggcagatctgataaagtggctggaggccacatagcctgggcctttcgttccaggctgagcagagtgggttttgctgtctgcaggagggagctgtggaagggcatgatcacgaccaactaaggtgaccctcctcaccaggcccagggaagactgaggcctggaaggaggctctggctgcctctgggtcttacccccaggccacagtccacccacttagaggcctctgtgagttaaggtggagagactatgagctggtattgactgctccattccccatcccgagagaggagacaaaatcagtgaccttggaaatgcctcttcgtgcctcagtttcctcaccccataaaatgggagactaagagtacccactcgatggggtttaatgaagattaaatgggttaacatatatcgcatgcttagaacagtgcctggcacagagtaaatgctccataaatactgactctcatcagtttgttatcacagcctctggggagggcgccagtgctgacttatgctgttcgtgttaaatggggctgtcactgggtgagttgtggcatacaggcccctgcactgttcaagagaccccagcaacccttgtgcttagggctcagcacatagtaaggcctccagatcatatacccagctctactccatgtactggcagctctgcccagcccataccccaaatacgcccattaactaaagggccctgcagcctataaagtgatgctataaaggttcagtgttcagcctttgaaattcaaggcctgggctgctctattgcagtacttagcatgtccccatcctgtctgtttctctctcccatctcagggtgaccgaatcccaccatctgcacctgtacatgccagccgggatggcgttcatggctgctgtcacctccgtggtctactatcacaacatcgagacttccaacttccccaagctgctaattggtaggtgaggtgtaggagggaggggcagtaccttcattcatttcttcagataatgtttactgaggactcattatgtgccagctattgctctaaacagtagagatttggaatagaaaaagaaaaaaatccctgccttcatggagcttacagtctggtgaaggaggatagacaggcaaagacagtgaataaacaagcaaacaaataggtggtggggatgctatgaagaaaatcaagctgagtaaggggtaggggcaatgacaatgttgctatctacacaggatggtcagggaagggctgtggtaactgtgggcatgcagatatttgggggaaggtattccctgcaaggggagtgacaagtgcaaagtcctctgatagggatagatttggcaaagatgtcactgtgggcaaagccaaatgagcaaggggaagagtgggaggtgagggcaggcgtcaggagaggagcgagcaagagtcccaggctctgggcctgagagcctgggtgaactgtggcatcaataactgatgtgacagaggagggggaggtgggctgtggtggggataaagttttctactgggggcatatcgagtttgagatgtcacagagacagccaactcaagtgtcaagttgggctttcatggggaggtcaggacaggagctacactttcaggaggtgggccttgtagatgacatctaaagcttgagcctggggctggctgccgtggctcacacctgtaaccccagcactttgggaggccgaggtgggcggatcacccgaggtcaggagtttgagaccagcctgaccaacatggagaaacccccacctctactaaaaatagaaaaattagctgggcatggtggcacgcatcggtggtcccaggtactcaggaggctgaggcagtcaaatctcttgaacccaggaggtggagattgtagtgagctgagatcgcgccactgcagtccagcctgggtgacagagcaagactccatctagaaggaaggaaggaaggaaggaaggagggagggagggaagggagggagggaggagggagggagaagaaagcttgagcctggatgaggtcacctggggagagaagagaaaggctctgggaccagagcttgaggtttgctaacatttagagagactcgggaaggactgcccacttagagcttctgagatgttaaatactgcaggactggggtcccaggcagaagcaacaggatgatggttggtgtttactgagcatgtgccatggggcaggctccatgccatgttccttacattcattgtcccacaggctaattcccccagcctccttattggtattgttaatatccccattttccagtgtggaccctgaaactgagaggttaaaaataataacagtaaatactcactttgtacttactgtatgccaggccccatcctacctatgtgatatattaattcatttaatccttgcaacaactctatgaggtaggtaccattattattttccctttacatatcagaaaactgaggctcagaggttaaataactggcactagtctagctcgtcaaggggcacagccgggagtctagcatctgtgcaatctcctaatcatttctgagactgcgtgtctaagggccctcagacttcgtccttggggtaaaggtatcaatccgcaggtctgcctctgtgttggggttcagcctgtgtgtctaaggctggggctgtacatctggcagttagactttgttcacactatgtccttaagtcagactgatttttaggtatcacagcatcgaattgacatttggagtctggcacactctgtgctaagccagtgacatcatggtgttgtcagggagtacagggtgtttcttgcactagtcacaggtctgcctttctgtagaaggtgggatctgagctccattaggattatccaggtgatccccctacccctagcccaggggcccccacatgagtatgaatgggagctgggggaagcaggttgagaggggagatgttaaatacaggcttcagagagccaccctgcttccatttctgaagtagctccttgtctgtagagaacccttcattaaccagggcctggctgaccagtgtcctctggaaacaccctgtctggacatctgaggagttcattttctcattctccagcaaacacataatgttctctctttaaagcacaagttatcacccgtggatggatttgtccttttctaaggaacaaagactaactccctccattccccttgttggagttatctccccttgaaaggacactccacagagccagaaattctagaacagggaaaagtggaggggacgtgcctgtgaactgcagggacagaaggaaatgggtattgggagaatggccagccctccaaggggctgatgtctggcctgggtatggagtcccacagaaaggggacctgtgatgcagcttacattgtcccgtgagggaaccatgatcctggaacccagatgaggccaaggaaatgttctctgaaaaagtcatatttgagctgagaactgaaggaactaactgggagaagggaggaaagagtgcttcaggcagaggaaacagcatgtgcaaaggccccaaggcagaaggaacaaaacacattagaaaattcagaagaagaagagtggcgtgggtgcaaagtggaggggagctggactttgggttttgtttgcttgtgcccaggctggagtgcagtggcaccaccttgggtcactacaacctccgcttcctgggttcaagcggattcttgtgcctcagcctgctgagtagctgggaatacaggcgtgtaccaccacactcagataattttttgtatttttagaagagttgggatttcaccctgttgaccatgctggtcttgaactcctggccttaagtgatcaggtctcaacttcccaaagtgttgggattacagccgtgagccaccgcacccacctggaaggtcataccacagatgtttgcctttatcccaacagcaatgggaagttgtgtgtgtgtgtgtgtgtgtgtgtgtgtgtgtgtgtgtgtgtggtttaacatgtttaacataaaatttatcatcttaactgtttttaagtatagtgttctgtggcattaagtatattcacagccgggcatggtggctcatgcctgtaatcccagcaccttggcaggccaaggcaggtgaattgcttgagctcagaagttcgagaccagcctggccaacatgccaaaaccccgtctctacaaaaaacataaaaattagctgggcgtggtaatgtacacctgtagttccagctacttgggaggctgaggtgggagtatcatgggaggctgaggagagaggatcagttgagcctggaaagtggaggctacagtgagccaagattgtgccactgcactccagccaagattgtgccactgcactccagcctggacaacagagtgagaccctgtctcaaaaaaagaaaaaaaaagtatattcacagtgctgtgtagccatcaccactatccatctccagaactttttcatcttcccaggttgaaactctgtactcattaaatgataactccccatttctccctccttacagcccctgacgaccaccattctactttctatctatgaatttgagcactctaggtacctcatctaagcggcatcatgcactgtctttttttttttttttttttttgagatggagtcttgctctgttgcccaggttggagtgcagtggtgcaatctcggctcaccgcaacctctgcttctctggttcaagcgattctcctgcctcagcctcctgagtaactgggactataggtacctgccaccacgcctggctaatttttgtatttttagtagagacggggtttcaccatattggctaggctggtctcaaactcctgatcttgtgatctgcccacctcggcctcccaaagtgctcggattacaggcgagagccaccttgcctggcctatttgtctttttatgacttgcttatttcactgagcataatgtcctcaaggttcatccatgttgtagcatgtattgaaatttccttcctttttaaggctaatattctactgtatggatatgccacattttgtttatctattcgtctgtcagtgggttgcttccacctcttgactcttgtaaatagcactgctatgaacatgggtgcattgaggggttttcgacataatcataataattgctttatggagaccagcttggaggagaacaagatggggaggaagtgtggaaaccaatgagaaggctctcagggtatagcgggaatacagaggacgcatgatgatgcctggacttaggtggtaccacagggatggagagaagtagatagagtcaagctatttaggacgtgaaatagacagcatttgttaatgggagaggtgtggggcgagggagaagaatagagggagaaggaggagtaatgggagctcaccagcagcccccatgttatgcctctttccttccttttccctcttctctcatcaggcattcagcttttgctgagtacttctgtgtctgacaacaggctgagcactcagcactgcaggacaggactatgcaaaaaacctctgggcctagtcctgggtgcactgctaattccctgtgtgaccttgcacaagacatccaagctctctgagcctcggattccccacctgggcaggaagagtaagtccctgcctaagtcatagggttgtaatgaagagcaaagcagaccatatctgttaagtgttagggacaagacaagcatgaggcatattttcaagtctcggctcctgtaggcagctctcactaagggctaaagggcttctgatgcctgggatagaatctgtccggcagagtggagtggaggcagggggacagccttcagctgtggaattcctccagtcctagagaccagcctgagctgggggacattattccagtcctgaggcatgagagcagaaggccgatgcttctgccctccatcctaatgtcctcctgcagggacccaaggtggatggcatcgatccccccgggtgagctcagccctgggcgcatggtggggcccaacatctcaacctgtttcctaaccctgagccaggcaggacagatcccagatttgtgcccaagagatgctctggcatccatgcccaggcccacatagggatagagggcagggtgaaagtctctctccctcactcgggtcctctggagaggggctctgtgtcatgaagctgaccttatccgcatctggtctaggagggaggagggaaggagctgccagtgctaaaatctcccccaccctcaaagggggacttcacaggttattgctggttttggttgttggaagctgacagtgatttattggcagattgaagtgagtgtgtgtgcgagaatttaggatagaatctactgatagcttctgaggtttaccttccccaggtcttaaatctggagataataaaaatataacagctaatgtccaaagagcacccgctgcgtgtgaggctcactgcactaaatgctttccatatgtttctcacaagaaccttctaggtagcactattatgattcccacttaatggatgaggaaactaagctctagaaggctaagtgactaatccaaggtcacacagctattatgtcacaggctctgagcccaggtgtatctggctgcggagccaccaccactaacccctgtataacgctgcctcacagaactgtggctggctctttccgtatcccccatgcccctgctccatcatcatgctgtggtgggctctgaactgtgaggacagggatccaggctttcaccctctctctgtccctagctgccagtgcacttgggcaaggtcacatcctatttctgggcctcagtttcctcatctgtaaaatgaaaggctggattgaatgacctttaagatttccctcacttggaaattccacaagtaagtcattatagcatggagcttgcatgcatgggctccagcgtcaggccagcccagctctgccagttaatgggtgtgtggccttggatctgttacctaacctttctgagcctcatttcctttgtctgagaaattgggggtgacggcagtgtactttctttgaaaagttatggtgaggaatagataagatcatgtgtttaaagtgcttacttggcacagtgcctgtaacttagttaaattcaataaataaatttcccattcttcccatgatcatttatttttaagggacatttgtctgaccagtttgatttatgagattattggtgtttttcatgaatgttaagacgtacgtgcgtcatcttagagtcatgtactctgatatattcacacgtgcacatccacttactcggaaatgtacacacccaggcacgcttattctgtctccttctctgccacatacttgcacacattatgtgagtgtacacacatgatgcacacacgtctctgcgatcttccatctctcctcggcagccctgctggtgtattggaccctggccttcatcaccaagaccatcaagtttgtcaagttcttggaccacgccatcggcttctcgcagctacgcttctgcctcacagggctgctggtgatcctctatgggatgctgctcctcgtggaggtcaatgtcatcagggtgagggtaagcaggccacctgggccagggtggggtgggaagcagaggctctggcctctgtcctgccctgggttcaggcccccaccctgcttctcagccaaactgagaagggatcagcttgttttacccgcccgtgtaaaggggagtggggccgtggcggaaatttcaggatagacactgcatctggcccacgtgtgctctaccccagggtcccagagggagaggggggtgatgggtgtgttcgctgaggttggcggatgactttccgtagaaagggaagataagcatcaggcactggcctctcctactttctttcttcgggggtgggggactttgctttaatgtattcatatcgtcacgctggtaaatgaatgagtaagtgttttgttttcctttctgtttgctcccgcctccctctctcttcctcaccccagactccaaccttccccttcccctgcccctacctccccaggcagcccagactaatgaactcgtttgtctttcccatgctttgtttttattagtataataccatatgtgtctgtctaaataaatacctattcaggttttttcctctcaacacaagtgaatatgtaggtttcccccacggtatttatcttgtaagaatgggatcatattatgcagttttctgcactgtgcttttctcacccaacaaatatctcttgggactccctccaagccatctgatatggctaattccgttttcttaatggctgcataatattccatcgtatggatgagccataatgtgttcagctatttctctatggatgggcatttactttgttgccaagttcttgccttcatgaataatggtgtgttgaacatacttatatatttatgtattgctgcttttatttctatgggagagagtccaaggaatggcgttgctgggtcaaagggtctgtgtattttaaattttgatcagtgttacatattgccttccagaaagactgtaatctgccagcaatgagtgagaaaaccctttccctgccttccaaccagcagtgagggctacagccctttcgaacttggactgcctgcatttctctgactcttctgcttttagttggtgatctgcagggcacaaagctccttatgtgtccccccatccagtgaccctcacaggaaccctgtgatgcaagcaccatcccctttatagatgaggaaacattttagatgaggcttgtccaaaaacaccttgctagtaagtggaggaggcaggattcaaaaccaggtctgcatgacttggagttctgtgaactgtatatgaaacatggtggtatccttagatctgtggagaagatagcatatgagagattcctgctcctccccaacccaacctaaacccaacccagcctagccatggggggttcaaagtcgacctcaatgagcagttacaaagtcaggatgccctgacattggtggccaagaagtgttggggaatccttttcctggtaataattacaggcgaaagatggccccatctgttagagatcaagtgtggaatatcacaaccccagatccttgctggggcaaggtagggagtggtgagaagttggacttacccatcccccatggcccatgtgccccacagagatacatcttcttcaagacaccgagggaggtgaagcctcccgaggacctgcaagacctgggggtacgcttcctgcagcccttcgtgaatctgctgtccaaaggcacctactggtggatgaacgccttcatcaagactgcccacaagaagcccatcgacttgcgagccatcgggaagctgcccatcgccatgagggccctcaccaactaccaacggctctgcgaggcctttgacgcccaggtggtcagtgggggcacagccacaccatctattcactgccttctggtttagggtcacagagagggacctcaaagggcattaggtcaaaatcctggtgggacaagaggggaaactgaggctggtgaggggaagaagcttgccttaagtcacacagtgaaccagggacaggtgcagggctgaggattcataggacaggcacagttggaatggcccttaccgtttaggtcgtctagtccaaagtccttatccagatggggaaactgaggctctgagaagggaagtgaccccactggactctcacatccctgtgctctttcctctgcagcttactgactataaaggttggagtgttcacttgatttggagcaggggtgttagtggcctgatccttatggtaactctatgagttgagccagacaggaatctccccatatcactgaggagcaaattgaggccctgagaaaggctgtgacctgcccagagctggccacagctggcaggcggcagaggcagtctcctggctcccagtccagtgctccttcacttcctctgccctcgcaccagggcagttgctgaggcagacacggtggcaggtggtaatgagtgagtgtggcacatggccacctcctcattccagtgctgtgctcatcacatagtccctgaccagctgtgtgaccttgagcaatcatctggccttagtttccccatctagaccatgttggtgttgatagggccctcccaactgtgcacttgctgattccatgatctcttcctggagttcacctatttgcagaggatgtgaccactgggtttccccagacaacaggagctaggggcatcctgggaggctaggcccagccgtgaattagccctcaggcactctgacctggccatggtctctctgggcagcggaaggacattcagggcactcaaggtgcccgggccatctggcaggcactcagccatgccttcgggaggcgcctggtcctcagcagcactttccgcatcttggccgacctgctgggcttcgccgggccactgtgcatctttgggatcgtggaccaccttgggaaggagaacgacgtcttccagcccaaggtaggcagccccaggggtagggtaaggcaccctctagatggttttcagttgtttctgagagtgcaacaggccaatgtgtgtgagccatggccacactggagtggctcctcacacatgcgcaaagcccatagcagtatccccaccacagaatactctacatctggtcaacagaaatgccagagggcgagcctatgccccaagggtatcctactctcctctcaccgtcactaccatagtacctctcccggtagttaggtcagtccgaaaactgcaggaagtgcttttgtttgtccagtgtctagagcttctgtgacttggatttgttggctttcagttcatgtcatcttagtaaactctttaaaagttttcaagatctgtcttcttcagtcctgtaaaggctggcacttgagctttctgcaggggcatcttgggagctactgtcagaggagagagaagtgggaaaccctcacgagtggagctttgtctctccccactccaaatttcattcaaagctgcccgtagttttattaatatgttggacttttccattaaaatttcttttttaagaaaagtttccatggcttaaaaaacactggagacttattagactagattatatccaatggccttggcagttgtaacgattctgcaaactgaaatttgttggagctagaaaacctttccccggggttatttgccctgcgtggggccgtagcatccacttcgggggctgggcagactgtgctctgttgtctgtttccttgcagccgtttaggtttaaatggccacaaaatgaaaactttttcacccctaataagtttcagagttttagtttccaagtgaggatgtcattataacattttaaccacagacagtctgaaaataatgcagagaatggggaattagggtttttaataatttatgacaccctttgcgtaacatttgttcatctcatgagctccaaaatcgcagccagcagttaatcctcaggaggtttatgttcatttttctggagacataattagtcagctgaacagttttggccacagatatgagatacgttgagtctgatttatgcagcaaactttcattgaacactgctgtgtgccaggcctgggttgggctgtgggaatatgaaagcaatagttatgatgaggatgattaacaatattaacagccacttactgaccacataatacatacctggctgtgtgcaggagttatccatgtgttatttaatccctaaaactatcctttggcgtgagtatattttgcaacatctttactgtggtatacctcaaatactgtacagtttatgagatgataggtattcttatccccattttacagatgagaaagttgaggctcagaaagtttaagtaattttccccagggtctctcagctagttaataacagaggcagaatttgaacacaagactcactccacagtctgggcatttacagccaggaagctaaattgactattattatcaagccatcacctctggctccaaggattatgaaatccaacagtgaggagagaaatcaaaataaaatacttttatgctatgtgttacatgtgactcttaggaggaatattcagggaattgtgggaaaagatagtgattaacttagccagtggtcatgaacagcttcatagaggaggggatgtttgaaaggggtcttgacggatgagtaggaatttgccaggctgccatgggaagatttcttgctcaaccaagaatgcaaggaccacttttgcttatttaaactttgatggcttttgaagccatatctggctttttgagcctctctactttacctggcccataaaagagaggggaagcggctgcttctcttgtctacaggagtgtcacctttggctctagcctgaccataggctaccccagaatacccccattggcgatcctgaagcagcatggagccagttgttaatatcagggggaaatggcacaggccagagcccttatcagagtgtccacaccacgctcttcttcctgtgtttcccaaaacccttgtgggattctgctaaggagagagctctgaggcaggacgtgccaaagagatggcgaaagcacttagaattttagttcatctgaacgttatcattgccgtttttttctctttgtttatacacaaaccctggggtttattaccgtctcattggaatgctcttgtcccagttacttagcacacaaatccctgagacagatggccctgcctcagtggcagtgggccttatcagatttaatattttttccctgcagcccaaacacaatcagaaaatttccgacacagaaacaagagttgaaagtaaatatagtctccagtgtccgcaacaaagaactctccatcatgtggttgcctgggatgtggcttaattctcatgtgggcttctgagctcagaaaatgggggaaagggatcatttactgagatcatttggttcatctcccagcccccaagccattctaatccagagagaaccgagtgctattctggtctttatgaatgacaaagaaggaagctccctagctacatgttgcagtgtttcacagtctgggagaggaagccgttttttctgcccagcctgaatccatcctgcagcagttggcacagcgaggcacctgtggtttattcatcatcactcttccttcctaagatactcagagttggcaagaaacatgtcatccttggtatccgcaaggacgaacatttctgatgtcctctttagttactgaaagtgtctgtgacttgccagatctttgatgctcctgtcaccccgctgccactccccagggaaagctgggacccaggttgggctctgcctatgatctatagctctttccagcctcctctccaacccaacccctactcccaatctgtcacctcccatggatgccactgatctggctgaaggacaagagaattagattcataatgagctgctggtgtctgaaacctgccagcactgccctgggctatcagttgagccaaaggaagaaggaacagtctgggtttgatcgaagggctaaagcttcaaacagcctctaagtctcagtaggaaaatgtgtaggtttgggagggtgtatgtgtttccgaatgagttcccctaagaactgcttatggttctatatgtgtgttctgtttgtccctgtgtcttttggtgtgtctttttctgcgtgtgtgtgtgcatgtgtgtgtgtctatgcccccgtttggattgccatatttgtggctatcattatgagtgacttaatgagtgtatatgcattggtgtttctgtgactttgtggttttgatgcatgggctggcctcttcataaccatgtccatgcagctggtctggcctagagtacctgccttcaattcactagctccttcttggccatcaagactctgctcaaatgtcacctgctccagggagccttcacctggttgaattagatgccccttatctgtgctcacataacatcctatcaaagcgccctgtttctttccctgacttgatcctctgtcccctattgcctgacctctgtgtgcccagcactcagcccactgcctgacacccaggagatgcacgggaaatggttctgcaaagaaggaataatgcagcaattactatatattgagtgcttacacttactgttttttcacatgcactgttacattgacttctcataacaactctctgaagtcccttcatagcctcaccttacagatgaggaaactgaagctaagagaggttgaggaacttacctaaggacacagtggctaatatatgatgagtcaggacctctaagtccaggctcttaaccaccgtgtcaaacagtcttgtatgaatgggtaggtgtgttggtctctgggtggccaaagataattttattctttacccagggcctcccggggctgggacctacggacaactcaccttttgacacctgccaaaataggaaacaagagtccaagtgatcccctctcctttaagcaccagagaacatgtgaaggggacctttccaatcatacctctggcctggcagagacaatggggctccaaactgtagagtcgggagtgctgggttttagtcctacctctgcagctaactcatttattctcctcagcagtcacattctgcaagcctcaaatgcaaaatgtgtaataacttctgtagaaagtacatgggggcatgaagatcattggcttgattgcttttaaaaaatcggtattgagcactactggggaaatccctggaaacaaacacaattcttccctgagagcttgtgaaaatgcaagactagggcctatgattttccaaagcattttcttccaccaagtgtcaggttgtaggtccttggtcttttctctcttgccttggtacctgcagggtgctgaccagtgctatcatatcccctccccgtttcctaggaccctcttctcggtagactccaacagggcctgccttccttgggcagcatggcaggcctcttggctagtctagtacccacttcttttttttttttttttttttttggatggagcctcactctgtctcccaggctggagtgcactggcgcaatcttagctcactgcaacctctgcctcctgggttcaagcaattctcctggcccagcctcccaagtagctgggattacaggcatgcatcaccatgtccagctatttttttgtatttttagtagaaacagggtttcagcatgttggccaggctggtctcaaactcccgacctcaggtgatctgcctacttcagcctcccaaaatgctggaattacaggcatgacccaccacgcctagtcaggtacccacttcttaactgaaacttagctattccaggttctatcccttttaaaccaactctttgaagagaggtctaataatgacccaatgacttatagctgcagtgagatttttattttaacaggtcacaaaattctcaatccacaaaagtagatttctgaccctaggttattttgttgggggcggagagaggaagtcaaaggttttgcagcctttagagctgcaaaaccagaatttgttgttttgttaaaaatgcacaaataccgacgagtatatttaagtaacacccatagtctaacgaacaaacatgatcagttggcttttccagccctcattctccagcctgtgtgttttctgctcattgtaacacagcgtgtgtgtggcattccatgtttctccagagctttcatgagaatcagtggtcttggatgcatagtgttcccatgagtaccttaattacctaaccattccctgtggttggaaatttatatgggtttttgcattctccttctgctctgaccccaaaataaatgtctgtgttcatacagctattaccttatgtgaaattattttctttgggataaattctcatgatgtgttgttgctttaaaatagtggactccagtctccagagctgcgtctctgcagaggacagtgggacagaagaatcccagggcatgttaaaaaggaccgggtcttcctaaacccacatgcctatatttctgacccagtaccagccaggggggcaagtttccatcccccacaagtcacaaacctgtaactgacactaggatgcttaaggtcaaaggcctggacgaggcctagacagtgggtctggggtagtgtttttgacatcactcaggttcatgttcacatgttgtccccttaccagcatgtgaccttgggccagccactaaccctactgaaactcctttttttcatgtatgaaatggggctaataatggtaccctcctcattagggtattgtgaggatagagttttgcacctgataaatattgtctcctgccccttcctcccctggaaattcaggtctctccctgcagcctaattttaaggcccatttttctgcttccagcccacccctgcccttctaccttcgacctcctccctctgcctctccctctggtgcactggcaaatgggacagagagcctcggtagggccttcctcttagagtcttgcacgcatccctcagtggtctccctgtggctgcttcctgctgccaccaacagatacagacccctgtcgcacagatcatggtagagacagtggtgagcaggaccagacagctccagggagcagtgagggctggcttagagaacctctgttaaactgagaggccaccatcaggaagctctgatccaagatccaggaatccctgactctagggaaaggcctccaatgagagcctgggccctctctgcctgattctgattgtggatgtgccctcaaactccttctcatcactttgttccatccctctttaccctgcagcagctcccacaccctgccaaacaggatgcacagtccagggcagtgtctgagaaagagcagagatctgtcttcatggaaatattgatgtggctctgctggggagcaatggatttatcaagatcaaagttttcctgggagttattgatgcttaatttggaaatagacacactgttgatccctggtatctttagcaacaaagttaaaatgtttgtttttcttcactggttgccatctgagatcttgccggaagtacacaagagaaccttaaatttaacaggaggccctgggagcccatgaggctggcgggcttgggtctgaaatcttttcagtctcttgtaagtgatgagctctcattctctcctgagagctctacggtgccatgttttccactggccttttctgctcagtaattgctacattacaggctgttggtaagttcggaacaagggagctgctgattccatttctgtagcagagaacatgcaccgtgagacttgttgtaccagttcaggttttaggtgctctatttattcttgccccattcagaatgctctcccctgggtctgtggccacaatgctaagagtcatatttatgggcctgcagttgtaattgggccccattctgttcccccaagtggaaagatgaacagggtgtaagcaaccttccctgtagttagaaaaacgtttagttggatttatcagtctgatttttcactcataaacaattgcacaagcctttgcaagcccagagggtcttgtaataatgatggccgtggtccattatggcacagtgatgtgttctacggtggtcattttgctggcaatgacagtcacctctgaacttctctttccaacagacacaatttctcggggtttactttgtctcatcccaagagttccttgccaatgcctacgtcttagctgtgcttctgttccttgccctcctactgcaaaggacatttctgcaagcatcctactatgtggccattgaaactggaattaacttgagaggagcaatacaggtacttggatgattattttttcactttgccataagaaccattattaggaataatgtccatgagtgttattcatcctcatggacactcaagaataattctgctgtaaatttattttttgttgcccattaacgatgttttaaaacagtaaccattgacaaggcagtgtgggatagtggaaaatatcttgggctgaacttgggagacagtgtagctctggctctggttctgccttggactgggtctgaaaatccagctgctcagcccttggcttgaaagtggtagacgtcactaattgatcacagcactctttctgaccaagggtaaatgcaaccttggaatcctctctaagtggctgttccagagttctgctaccagacagtcttctttgggtgtgaaaaaaggaatgtgcttgacatacaaggtctagatagcctctaagacagggtcccctctaagatggggtattggtccatggcctgttaggaactgagccacacatcaggaggtaagcagtgggagcaagcattactacctgagctctgcctcctgtcagatcagcggctacattagactctcataggagtgcgaaccctattgtgaactgtgcaggcaagggtctaggttgtgtgttccttatgagaatctaatgcctgatgatctgaagtggaacagtttcatcctgaaaccatccctctcccccaggtccatggaaaaattgtcttccacgaaaccagtccctggtgccaaaaaggttgaggaccactgctctaagttctatttgaacccttaagtcttgctcactaatgagagtgacctatttggtctgttgggtcacttaagtctaggctcttggtcctgccttctgtgatttccttcttagagtttctggaaagatgatcaaagccagggagtgttcagggcccctctgaagaaggtgatgatgagagttgtccaagtcccagggtcttcactaggattttggttcagctatcagactagagagacatcctgattgagagtagtttaaatgggatagaagtttgtttattcttcagatagagtcagggctgacacaggagctactcaatgatcagagacctggcttcttctgtcatgttgctctgccagccttcttttgtgacttttgtctccatagccatggtgggtattgaaactgccactatatttacatttaaactagccagaagaagggacaagaggagggaacgcattttccttttaaaatggtaatacctgatttgcacataccctctcgcatcccattggtgagaaagtggccaaatggccgtatctagagagtctagaaagagcttggtctttattcttgacagctatatatgcactgctagaaattctctgtgcaaagaggagaatgggcattgggaataactagatgcagctatgcctagtgatgtccatgaagttgtggtaaaatcctgaagctaccttgttctttggaaatgttcctcagaatcattaacattagtcatgtgggagacaggagaagaagctctgcagaaaagggaccgagaggacaaggatatagcttgggctggggacaatgtcagagtccaaactctggctatcttggaatagtctgtgtgaacggtgccctcccaagttgtgcagtgcacaacctgtgcagctatatatggcaaccctgcccatccccagtggtttctcactgggaaagcagagtatttcctcagggatgtcattatgtgacaatagtggaaaaagcccaggaaaatctaagaccttctaagactcatgggggcccagagctgggaggaaccaagctgttgctcagttcagaaaacttctctagaaatcccagcctctcctcacacccctccagtgacaggcagacttgcaccaccacaagcaacagccacttttgtggttgggcagttttgtaattaaatatactaatgtgtgtatgtcataaattacattttccaattatgccaaaagagccaaaaatggttttttaatggttagcatataatcgtttttatcaaattgcttgaatctttcatgttaataagagagattcattactatgccacaaaaagcaaatactggcattaattatagaaacaaattaggggggtggagcgcaatggctcatgactgtaatcccagcgctttgggaggctgaggcgggtggatcacaaggtcagaagtttgagaccagcctgaccaacatagtgaaaccccatctctactaaaaatacaaaaattagccaggcatgttggcgtgcacctgtagtcccagctactcaggaggctgaggcaggagaatcgcttgaacccagcaggtggaggttgcagtgagctgagatcgtgccactatactccagcttgggcgacagagtgagacttcatctcaaaaaaaaaaaaaaaaaaaaagtggctcatgcctgtaatcccagcactttgggaggccaaggcgggtggatcacaaggtcaggagatcgagaccatcctggctaacatggtgaaaccccgtctctactaaaaatacaaaaaaaaattagccaggcatggtggcgggtgcctgtagtcccagctactcgggaggctgaggcaggagaatggcgtgaacccaggaggaggagcttgcagtgagccgagatggcaccaccgcactccagcctgggcgacacagcaagactctgaaaaaaaaaaaaaggaaagaaagaaggaaaggaaaggaaagaaaggaaaggaaaggaaggaaagaaagaaagaaaggaaagagagagagagaaagaaagaaagaaagaaagaaagaaagaaagaaagaaagaaagaaagaaagaaagaaagaaagagaaagaaagaaagaaaaagaaaagaaaggagttagggagaaaaaaaccctttctttctttcttttggagatttccggaaaatgtacccttacggatgagagcctgtgtcttcatgggttagagaataaccacgctttgtgcataaaaagttattaagcacaattcctgaattatacataattactagctgtcagtcagttgtgcatttctgtgtatgctggtcttcacttaataagactttatttcacagatcacttggtgtccctacttcactgaaactaggtgattatcttttgaagtctcatttcacataacctaggaggtatatagatttctttaaaaatgtcattgccattattttaaaccttacccatggtatatataaacttacagaaagacagaataggttcattattttaaaccttgcccatggtgtatattagctcacagaaagacatagaataggttcctgccttaagaaaacctgacccacaaaaaagcctgggtttacacaaaagaggaattaagggcggggagcccaccttacaacagaatgaataatagaattttatccaagagcaggcatcctgaggacatttaagacccggatgcatttttccttgttcaagagcacacatccaaaaattgcagtctttctgcgagtcatgatcactctgcacataaagcgtttaggttcagagctcggggaggccattaccatggctgctctctgtctgccctgtgagggtccttggggtggctgcactctggggatggtgctggggctgactgactcacgcggtcgtgtaacacatcagaccttccaaagtcgaacccttgttttgtttcaaggctcaattatgacaggacttggtctcagagcagatcccctccctaggctggagaaggccactttaaaacagatggcctgccccacttcatcatttttatggctctgatctgtgttctccactggcctctggtaaatcaagaatacaagtggacatgaagatctgctttaaaaaataaagaacagaccgggtgcggtggctcatgcctgtaatctcagcatttggaggccgaggtggatggatctcctgaggtcaggagtttgagaccagcctggccaacatggcaaaaccccatctctgctaaaaatataaaaattagctgggcatggtaggcacgtgcctataattccagctactccggaggctgaggcatgagaattgcttgaacccggaaggtggaggctgcagtgagctgagatcatgccacttcactccagcctgggaagcagagcgagactctgtctctaaataaataagtaaatgaattaaattaaataaaaataaagaaccaattaagtcctgtctacaggaaaaggccttacttgctggagaagtagcttgctgtgctggagtagactagtaagttggaacggtgatacagtaccaccttacagagctgctctagggcaccatggggactgtctgagaagcccctggcacactgtaacaggtggcatctggtgtggtgatgatgatgagaatgatgatgaatgtgaaacactctgctctcatttctagaccaagatttacaataaaattatgcacctgtccacctccaacctgtccatgggagaaatgactgctggacagatctgtaatctggttgccatcgacaccaatcagctcatgtggtttttcttcttgtgcccaaacctctgggctatgccagtacaggtactagatgggctgaggggaagggaggggggcagcaggacacacaaccagaatctgctggtccatggccagtaactaggagcacaccgtcttccactccatgcttgcctgtacctttcacacacttggctataccacaggctgtacctctgggtccctcctgtcccatactctgcaagcactgaccatctctcttaatgaccagagaaggcagtatcattaagactttaaaaatggagccaactttataaactatagaaaaatcaagccaggttcaggggctcacacctgtaatcccagcactttgggaggctgaggcaggaagattacatgagcacaggagttcaagactggcctgggcaacacagtgagaccccttctatgcagaaaaaaaaaagaagaaagaaaagaaaaatcgtacatggaatgcccacagatcttaaaagctatgttgtagcaaaatatttaattacatcaaaaagtgttagtgatgtatttttaagcaaaaagagtaagttacaaatagtatatgttgtatgcttactactaaactggaatatatgttatgtatacatttgtacagattcacacatgaaaaagaattggaaaatcacatagtgggattataagtgatttttattttctttatgtgtttctaaattctctaataagcgtgtataagatttggaaatcaacaacatgatacttttagcctaggcaacaaagtgagaccctgtctgtacaaaaaattagctggaagtggtggctcacaactatagccccagctactcagaggctgaggtgggaagattacctaaagtccaggaggcagaggttgcagtgagctacaatcacaccactgcactccagcctgggcgatagagtgacaccttgtctcaaaaacaaacaaaacctggtgttttttagccagatgtggtggtgcgcccctttagtcccagctacctgggagtctgagatggaaggattgcttgaccccaggagttcaaggctgcagtgagcaatgatcacgcccctgcacttcagcctggacaacagagagactcctgtctcttaaaaaataaaaataaaaacgttaaaacatggtatttttttaaagcaagacaacctttggtgctggctcaggaagaggtacattaccccccaataatcagaggagaatcgtcagcatgattgatctgacctcgggcttcatgtgtcccatctcccacccggagctcttccaccacagagtctgatcctgtcctatgcctgggactaaatcttcaccctggtgttcaggccagaaaccgaaatcccagacccattcccagagggcgggaaggttccaccgggagagcttgatgtagcagaaagtgacttgggtgagacaggctgattcaaatacttaacctctctgagccttggtttctttatctatgaaatggggaggctgcccaccctctggagttgctatggcaattcagttagataatgtaagtaacacagcaggcagagtggcccccagagtcttcacttcgtaaatatcagatccctctaccttgcacatgtttggtatgagtgaggtgttaccaatccagaatccattgcttcttgggataaagattccataaaccttcatctccagtgatttgtattggtcctccttacttgtaaagcttagagtttaaaaatattaaaagaaaaaaaggggagaggctcccacagggacacagctagacaagatgagatgcagggaatctgatgttcttttttatgggaacagtcatatatgccatcccccattaccacctacccatgcccagactgcccccgctccattctgccaagacagatcaatgactataaaagctacaaaagggcctggagatctcatctagtttagttaccaaccaaccttttatgcacaagactttctaagctgggtgtggtggctcatgcctgtagtctcagccactcaaaaggctgaggtaggaggatggcttgagcccaagagttcgagtccagcctgggcaacatagagagacctcatctctaacacaattttttttttgaaacatgaaaaatgaagatttctgaccatgcttctctcattagttaacactttgggctgtgagggtctgatgcagagagacacagcctgggaggatcctaacatgtacacagcattcaaaaggctacaagacactttctgttgtgtccccttgaacaagcagtttgtaagattttgttggccaggcatggtggctcgctcctgtaatcccagcactttgggaggctgaggctgatggttcacctgaggtcaggagttcgagaccagcctgaccaatatggtgaaaccccgtctctactaaaaatacaaaaattagccgggcatgatggcgtgtgcctgtagtctcagctactccggaggctgagacaggagaattgcttgagcccaggaggcggagactgtggtgagctgagatcgtgtcactgcgttccagcctgggtaacagagcgagactcggtctaaaaaaaaaaaaaaaaaagaaatcaggttttgtctactaaacctgctgcacggttaccgttactagtactcacagggtttgttgcacatgcatcgttgctaatagtgctaactaatattaacagcccttgccctatgcctggccctgtcccagcccccctcccttgtataatttaacccttgcactgggggtagagattttcatatctactgatttcttacctttgctcatttatcatggagtgtcctttggttttctgtgtttgtatatacctttaccacttatagatttgaccagcactcaagaaccagtgttactcctgggagttaatacaatcccagccccatggcaaagaaactcatgtggttaggattctgtgtgcagcctggttagccacagggcacgtaaggctttttataatattgacatgagtgcagaagccccattcccgtgtaagccctgagggctcttgtttcataatctttttttggtcacatgcacacagctttattgagatataacccactcatttaaagcatacaaatcagtgggttttagtgtcctatattcacagagctgtgcagccatcatcacaaatgtggaagttttcatttccccaaaaagaaacccgtacccattggcagtcactcctcatcttcgcccccagcccttggccaccgtttatctacacatacttttgaaaggctagtgaaactttctcagaaaaataaatgcttgctcaaacatttgggctataatttcaggggcttcatgggtgcccccctgacatttatcaagaacaccaggttaaggaatttagctataatggaggcctctgtgtttcccagtctcctgggtatcagaggcccagagagggcaggtgccttaccctgggccacgcagtgaaccagtggcagcaccatactcacacatctcctttctgcggttccccagtgacagagttctcaggaagctttttcatttattttctgagaggagggtaggccatcttgtattgatctccaactatatgccagccacaattctaggtgcttatcataaaggttcatttaatcttcacaatagtcctgcagagtggacagagtccttcagagtgggcattataatcaccattttaaagatggagaagctgaaaaccagagaggttaagtaactcacccaagactgcacagcaaaaggctggggctttgaaactcagggccacagactccaaagactatgtcctccccactatgctagatttttttcctaacctgtgaataggagacaaaatagtccttttatttctcacagttgctttgcacactcagaatccatgatttcttctgcatgagggccattcagacctgtgcagaagagagtaatggaccaaggagtcttgggagcacctaggaggaggggatgggggagcatgaggaggagccagggaacagcagcagctgcagcaccagctcccaccccagcctctgccagtctcttggaggtggtgtgggtgcagacaccggctcacaaggtgccctgttagtgagcttggggtgccatgggagccttcttgttgtcaggcccaacccaagctggctgaagaacaccctgatggcctccatttgagcacaactaatgaaggactggatgccagagataagtccaggagggtgatgctgcagggcaggccagggaagagggtacttcatctctatcatggtcctctgcccatccatgccagcatctaacacctgttaaacactgggaggcaggtggtgaaggggccacttcccagcctctaagatacctcctaagccaggaggcattctgtgattaaattacagggcctcccacttactcctttatccttgaggcggtgctggaagcttaatgccaatctggtgtagggctctgggactacaggaccaaggcaagcagtcctttctctctctctctctctttttagctaaggaagccagcacatctgttctttgagaaaaagccctgtatttagaggtgtctgcctttgaaggcaacctgagaaactgtcatcttggcgctttggggactggccatttacacttctcataaatattcagaagtaggcagtcatttacataaagctaaatgcagaaggaattctcttttcagggaatacctggcagattcattaaaaaaattaaagaaaccaagagcataagaatgaaaagcgaattctcggaccccaggctggttttttctggcatgggtgcagtaactttgcctctttgctcagttatcacttttttccaatgacagtaaccataagccctgagagccagcaaatagaacaaaaggtgctgtcacaaacattgtgcaatctcatctctgagatttccatctggaaaatagactggagagagttaaggcttcaaccagccttgcagataaatgcagttagttaccagcccagcaaccctctgcttgcatgagagcccattatgctaacctccttttgaaattgctttgtttctcctccttccctgcactccactccccaagataatttggaaacctgggcaccaaggcttgtcccactctaggggactggggaaacagggattttgccagcacctcctggcagggcaaccatcaggtcaaagggacctgacccatgaccccttcctcagatcattgtgggtgtgattctcctctactacatactcggagtcagtgccttaattggagcagctgtcatcattctactggctcctgtccagtacttcgtggccaccaagctgtctcaggcccagcggagcacactggtgagtgcccaaaggtgtgtgtgttttgtccctcttcccctccttccctcgacagcagcaggtctcctcccacacacccacactgtcattgactttgactttgactttgagtaggccacttcacctgtccaggcctcagcttctttgtctgggaaatggagtcaatgggggaggaggctgcctcccggtgaggacaggaggcgggcatggcagtgacagtattgacactcaggccttcctctcgggtgggagacggagcagaagcctctcccctctgactcggggacccctgcaggagtattccaatgagcggctgaagcagaccaacgagatgctccgcggcatcaagctgctgaagctgtacgcctgggagaacatcttccgcacgcgggtggagacgacccgcaggaaggagatgaccagcctcagggcctttgccatctatacctccatctccagtgagttcaccccacacagccagccctgggtgctgctgcgtacatgcaaggagagggtgtcagagctcgggtaagagggggtgcagggacagaagcaggaggccttgagattatccgactcagtaggggagcctcaaactggctctgatagctaagctcccagaaatcaaagtactcttcattcatttatccaacaaacatgcatggaaagcctgctatgtgctggacactgtgctggccctcaggatacagtgatgaggaagagagatgaagtttcattcctcatggaactgatatgttattgacagacagcagcaagtaagtaaatgaccacagttttgaactctcctaagaatgaagactttttagtaagtcagactgagctgtcattgccctggggaagctacaagaaagcttccatccacttggggctatgcaaaagaaaaagactagttatccttaaatatcagaagcccaggctgaaggtactcacaggtgtagggactgaatttatattaaccaagtagtttgggaaccccaagccaaggaagaagaaaaagaccaaaactggtaaaagtcctagagtcccatatacttgaaaccattttactgagaatgtaaaacttttttttctttttttgagatggagtctcgctctgtcacccaggctggagtgcagtggcaaaatctcggctcactgcaacctccacatcccaggttcaagtgattctcctgcctcagcctcccatgtagctgggactacaggcacacaccaccacacccgactaatttttgtatttttagtagagacagagtttcaccatattggccaggctagtcttgaactcctgacctcgtgatccacccgcctcagcctcccaaagtgctggaattacatgcatgagccactgtgcccagcccaaaagattttttagaaattgaaattttagttatggaaattaattcagtgaacaatggtcccctggtcagagtgagggcttacggaggtcaggtgatccatggagtcctggcccaagtttatctcacagttggtctcgtggctccgtggacccatcccatggtggttacttcccaagtgcataattgggatgtagatatttagcaaccagctgacttcacactagttccctgacctgtccagtctaagagtcattatggccaagtggaagcccctggaaagaagaaaacaaaaaagaaaccaaaacttactcagtgcacaggttacatgaatgagtatagctgaagagagaatttttgaattagaagacagatgagtggggattacacagaacgtggcaaggagagtaagttggtagaaccattttacagatgggaaattaaggccagaggggagtgtgttcctgagatccctcctgaggttagtagcatggctcggactagatcctccaaagtctcttaactcctggtctcaggctattttccacaaagagctgggggcctctgtggggtgaagaagacttaggacaccatggggcaccattatgaggccatttcctcctaggagaaaaaaaatctctgggctctgaaaggagtagaattagggtaggaaattaagagaggctaccgaccacctcctccaactaaaattggttcttttggtgccaggaagagacacacctggtgggggagggaaggtggtaatggagggggtgctggtagtgtctcccagatagacccatccaacaagtctcatggagaatgagacggtcactcaggtcatctgcgtattcttggcattcttgctgcctagagagagagtctgatggagctaggtggccaccaagctgtcccactccccaagacagtttggaaacatgggcaccaaggcatgtccctgtctaggggactggggaaatatcccatagcagtgttctcacagtatggggctggccatgaataccccaggagtccaacctccctttgtccagctagaccatggtgtcctatgcctcaggcagggaatgtggtccagtcatcagtggctgggccgtctgccatacatggtgcaagccatggcgttttatgcagaaagtcctgctagcatttgattttctcagaatggagctgtgagcatggcaggcaaccactgtttcctggattcttcaccaagacaccccaagttcctggtctctccccgttatcctcatccctgaccctgtggttctcagagcctccaaacacactcaggctaagcactccatagacaggggaaatttggaaggaacatctagggagctcagaaaagccaatgtccctagccccaggcccacttcaaccttctctctgtcagtcctgcctgcccctggaggctggttacatgaagagtaaccccctgcttgtgtatagccccccagttttgtacaggtttagagacagttcccagcagtaggaacagctgccgaggtgggagagggcttctcccgatagccgggggacttcctctcccaggaacaacagggtggggtagagcaggcttgtcgttgctgagatagagagagggaagggaaacaacaaggaaagtgggggcactgggtccccaaggttcctggcacagcaagcagtgaagttggggcagcctcaggtcatgtagtgggggcaggtgacatctgctttgactgctcctaagagatatgtactcatctcctggattccaaactgcagcctgggacatgttttcttatataaacagcatcaaaagatgtgtgagttcccaggctagcccactgaaccctacctagtgggtgctcattgtcccccagagcccccagaagacaagccgtggctttgtgatgggcctggggccaggaggacctagggatatgttgtgaagagctgagaagactctggaaaaaaggggctctggagccaagcaggagcccgcccaggactcctcacgtgtccaagtcacctagggagagaaacagagcagcccaggttggtccctggaagagagcagcggaggaggggaaaggggagagcccctggggagagctttgaaagtcaagtgctgtttgctcagtgtgtttgcctttccgaggatgtgtttttttttccctccgttagtcagcagtgggagggggagagagacgggtggtagggtgcagggtacctcctggctgcaggcatatgctttgagtgcgtgttcatttacctcctctggacttcctgccttctgttaccagggatcaagacacaggtcattaggcgtgaggtaatggggcatctcttgttctgacccctggcgccagtcttggagtcctgacgctgcagaggagccccagagtcacatttcctgttggggcccatcctgctcatatgcggcaccatcagacttctgggcaggcaagattacctgtgactctgtctgatggtctcgccatcaatatcactgagagtagctgtgtatggagtcccgaactggtacaggataaaacagggggctgaaaagggaatgaatgggcacagtttctctggcatcaaaagtcacatccagaattgatatttcctgttgagtaaaaatagaaatataagttgctcagtggatgttgagtgagccctattcatgtgccccactctgtgccaagcaccaggaaggagggaagggaaaaatgataagatgttctccccgttctccaggagtttatgctccactaagaagtcagagctaacatgcacagaacagtgtggcagcgagagcagaaccgtgtggccagctccatgcttgccgcctagcaagcgtgattgcacttcatcctcataacaacttggtgaggtgtgttgctctgttgtcccattttacagcagagaggactgactctcagtgaattgaaatgtctcagtgaggtcttccacagcaaaaggcgaagcacagagaaggaagtccatgtgggctgggagttcacccagagattcatgtaggggcaatgtgggctgtaccttgcaagatggtgggatttcaatgaggagaagacaaagtgggaggaagctggagacaaggactgtggtctcttcctttagaagtcagttcaatctttttttccttgtggaagcagcataactctaggtggttcctctgtatctgaggacaagctttgtagaggtgacaaaggggtcctaggtcctatcaggcaagcactcgatatgctgccagttcattctgtccattgtgagatacccattccagagcgcttcctctgtgccaggctctacggaggttctggatgttaaagaggaagcaggcatggccctggccctcccagtcttgtgggagattgatcatgcccatgaatagtgaccatgtggtcagagccacagggtcaattccaaatgcccctgtttctcttttgtgttactcacctgactctgggtctttcgtttcttccattcattttttttaaacaaatatttcctgcccaccttctgtgtgccaggcctggggatgcagtgggagaagcctctgtcctcctcagtggaggcgctaactcagaacaggcagtggagaaaaacaacatgacctggagacctggtgccccttccttccccagcatctttgaaattcttttggttgttgttgttttgagatggagtctcactctgttgtcaggctggagtgcagtggcgcgatctcaactcactgcaacctctgcctcccaggttcaagtaattctccctgcctcagcctcccaagtagctgggattacaggtgctctctaccatgcccagtaatattttttgtatttttagtagagacagggtttcgccatgttggccagcctggtctcaaactcctgacctcaggtgatccacctgccttggcctcccaaaatgctgggattacaagcatgagccactgtgcctggcctgaaattcttcaatatctacctgcccttctgccagttggtgcagccacagtgggctgcttatgcatatcctggcctggcttggtggggagcatggctgagggagagccggggcacccatcaattaaggaggtaaagatcagtctgactgagatgcctcctgccacacttcctcagctgccagcaactgacaccattaacctgatttccttccccctctgttgactgcactgactattggactgaatgggaaacagccccgtgcacctcaaaatgcacttcccctcctgcagatgcatcttgcaattaggcccaaactgtgagcctgcatgctcctcccctggccctgcacaggcaacaaagctgaagttaatcagaggtacaaatggctggctatgcctctctgacacgtaacttctggaacatgtatcaatgctttggaaatgaaaagctcctggtattgcaatgccaggctggtgcccataagggccagaaaacattccttgggcaaagccagggggagtgggtgatctgatcccagctcaggtttgttgatttgttgttttgtttgtttcgttttgtatggggcaagggttgagggtatgaaaaacttacactatcatttactaccgtagtccccagaacccagcacaccagcacaaggcctggaacagggataccttttttgaatgaataagtctttttttttttttttttttttttttttgagacagagtttcactcttgttgcccaggctggagtgcagtggcgcgatctcggctcactgcaacctccgcctcctgggttcaagcgattctcctgcctcagcctctcgagtagctaggattacaggtatgcgccaccacgcctggctaatattttggtatttttagtagagatggggtttcaccatgttggccaggctggtctcaaactcctgacctcaggtgatccacccaccttggcctcccagagtgctgggattacaggcgtgagccactgtgcccagccttgaatggataagtcttaagggatatttttggaaaggatattctaaaaaatacccatgtctctacactattgcagaagggctttcagttttgatggcagcctttcaggccagcctacacgcaactaaacttttccataacagcatcacacttacacaagaagaaggttttataatccacttgccattatttaacatagttcttcctccttaactttcaagatctgagcactataatgttcttctttttgtttttgtttttttctaaatcaaattaaggtgagtcacctcaccttgggcctgagttggacagaaatctattcttggctatattccccacccctccaccaccttggaaccttatagaactttatgtggttcaggaaaatgagggcgaggcctcagatcttcaacccatgacagctgtatgcccagctccctgccttcctgtcttacccccagctagggcacaggactgactattgtgcccagagaggtgccagagcctgtaacaaccccagacttcccaggtccagccacatccaccccagagccccaaaagatgatcttcagagagacctttaaaacacaagtagctggtcacttccatccagaccagaacccaagatggctgtgctcttgctgagacatgttggttgtcattgcctccgagcccactttagccctcagctctgtaccagaaatgctgttcctttgggaatcacagccaaagaagagatggagcagttctggaataagaacacaagttcaaactgtcccatatctccccacatcactatctacagttggtctcttcccatggcgatgtccatctgccaccgtggcactggtattgctttgagtgcaggggtctctctttttggcatgttggccctgttactccctgggaactttgagtcttatttggaatgcgtgaagtccctgtgtccggggccagcactgatccacacagctaagtttgcactcatcttccctctcatgtatcatatctggaatggggtctgacacttgatgtgggacctaggaaaaggcctgaagattccccagctataccaatctggagtggttgtcccggttcttactgtactgtcctctgtagggctggcagccatgtgaagaacagaggttcccagcatcatcttcctacacattattacattcacccatctttctgtttctcacttttatctccagcctgggaaaagttctccttatttgtttaaatccttttgtgcttttagatccccttggagcagtagagtaccttgtagaccataagagtggaaaagggtctagttttctccttgtttctaaagatggggtggctgaaaaaactccccttttttgcctacagcttgcctctctgggcctagaagtggttattctgtctccatattggcctttgatttgtgctgagggtcagcttttggctccttcttcctgagacagtggaaacaatgccagctgtgtggcttctgccctgggggctgggggtgaggctttgggtgccactgcctgtgggttgctggcttaaaggacaattctgttcattggtgagagcccaggccattaacacctacgcagtgttattgaaagaagagaggcgggggtggaggggaattagtctatcccagctagagggagataaagagggctagttagttcttggagcagctgctttgaggagaaaatgtatagcttttgacacaacaggaagatccagaaaattatcattgaacatattaaaggttatttctttttcttgcaaaacacacacacacacacacacacacacacacacacgcgaacacacgcagctgatgattctactctcccagccccagccctgaaggggacccagaactccctgcacaaaggctgtccttcaaggggagggtgaaagaagtggaaaatcacattttcattctttagcgtctccatacaacagccagaactgggcagaagctaattatatcagaagcatactccatgttgctgcatcagctttgggatgttcatttttaaatttatttatagcttgtctcattcctcaaaggagttcagggagctacaaaaataaagacaataaaattgaaaaaaattaaattaaaaaaaccatgaccagggaaaatgtgcagtagaatgaagtgtcaattatcacgttttctgactgcaaaatctcccccacggctgatgcaccatcatttactacaacagcccctcttgttggacatttccagtttatttcgtttgggatggtttgttgctgttgctgtggttgtggttttgttttattgaattttgtgttagctgcagctaataccatcttgctgatggctttgcgctgctcttgaatgattactcaggataaatttcctggagacggattataggatcagaaggtctgaacttctgtgtggctctagctacaaagcaccagattgctttccaagagcgttgtagcaatttataatccaacactcagcctattttttggctgggagtcaagccccagaatgtgaaggaggggtcttggcctggagcaggggctgagggatgggtgcacaggacccctccttattggttatttatggggatgggccaggaggagcagaatagaggcccctgccctcccagttgctccttggagtgactgaccccataggggaggggcgaggctacctcacatttagaactatgtagttggtgatggtcaaggtcctaggtctgatgggcatcctcctccctctcctcctcagccagtaatggctgcactatgtcgtatgtcctagatctgggtcccttttgctgtgggaacaccaataatacttacgctgtttcctgccggaaacggtgcaggagggctgtggcatggtagtgggccctggaaaccatctagccttcatgaggaagggcagttaaagcacaggcatgtatgatgttggtattgattaaaagcctcacgggcagagaaattcgccatctgccagggccccagccatacgagggctccagccatacatcctccaggagactgggacctctccaattgcaggagccttgccttccccatcagattaggaattccccgaggatggggacaatgtccttcccacctgcttgagaactcctaaggggcatgtactctgtctccccattgtatctggaacttcctgggagcatagctcctgtctccgtcctcagactgggaatcccctaagggcagaggccatgtccttccacccacttgggattccctgaagttggggaccacatctctgatgtacaatgctttgtatgtactgactgctgcaggattcttggagtaaatgggcagtcaacttcttggactggtattgaccatctggacttcatcagagtgtccaagactttgccattcattagacaggggccatgtgcacaggcagagccctggcctctggcttctggctcctgactcctggtccctctgctttaatttggctaatggcagaaccagactcctttctgggctgccctggaaggggatccttgaatgaaagaggatagatgggaaggtggcagctgacatggttacctcttatgccatgggggggctgctctctctggaaatttaggcctggggtcagggcactgttgagcattttacaccctaggccagaggaggggtgacctgtggagcagggctaagctagtagcccatgaggtatgatgtgtaggcagcacctggggctcacagagcctgttacccatgttatctcctctgaccttggaaagagctggggtgtatgaacaagtatttataagtttacaaaaatcatatgaggaaactgaggcacggggaaggtaaatgacatgccctaggttacacagcttataagtagcagggattctgcccttctgtcacaccaagtcccactgtcttttcttcctggagtccctgtgactgatctaaaggccacatgtttaacagaataaggaggaggcctctgttgcagcaaaccagctaccccacccgcacacagactctaagggacatcctgctttaagctgtccttagttactaatacctcagtgagaatgagtttgaaattttctcaagagccatgggagactaggaagtctctaagcttcatagagagcctggcttggggggacacaggagccaaaggcagaggaagaagtggcagctttgtgcccccagaaacacgtgctcctgacctcacagttggccacagccagccaactctcccatccttctcccaccactttcccgtggggctaacttcaccctgtccacacggagtgacttaacagtttaagccccagagtcgggggccggggtacctgggacaagagtcctgagggaaatggggtgaggaactggaagtgccacagggctagagttctgcccctagcctactggagctgtgccccacaggctggccccactggactgcgctgcctccaagccatcctgggcatctccatgtgtagctgtcacgctcctcccactaaacgcctccctgtgcttcctctgcagttttcatgaacacggccatccccattgcagctgtcctcatagtaagtggatcctttctccatctcttgggggtagggtggagggggagggcgtctgcagtgacaggctgcccagatttggcctttctgcacaggggcctcagaagacaggctccacagccagactgaaaataggatcgaaagtttatagagggtgtggcccctccccaactccagccgaacaggggcctctgcctccaggcctggaagaccggaggcttagtatttagagaaattaaactttcttttaaaaaatagctatccaaatttttaatttttaaagtgaaacatgtgtattgtagaagtgatgggaaatccagaacagaaagctcaaagagaattaaaatcacccataatcccactggtaacatttttaatgtgtttctttccagtctttttttaaggcctatgatatgtcattttctacaaaaataggaatgtgctatgcatgcagttttgcaacctgctcttttaaatttaggaatatgccacacacaattctccatgccactgaatattatgatggtggctttctaaagcaattttgataaaagctgtgtgtgagctgagccatgggggtcaagcagcatgctcctacagaaaggcctgggcccctacgagcctgcagccccctcacccagcctcccatccccatcttctgtgatggctgcagttccttaaaaagatctgcttatttcccccggggccagtgtccctgagctgtgtagagttcacagcctgtcggatacacttgggaattcacttccaatgtgatgtattgagctggttcctggcctggctcctgggggaactgtgggtaacagaggccactgagccagccaggtggctggggcaaagcactgtgcagtttcgtaatcactctgtttacgttatcccgatgaggactggggagatgagcaccccgcctgctgtctgcagagggggccgtgctgacctaacccgagatctcctccctgcttattcccagccaagactgggcaggacagggagtcttggccaggacagggagggagcagcccctgctctccagcttgaagtcctgaacttgttggggacgtttccatgagatgactgtggggatgatgaaggtgtctccaactaaaagatcctcttaggagcctgctccctgacagccctctcatttcccttccagtgctgagcgtttccagtgtgggagggacccacaccctgggccaccctggcctcacttgtgcctctgtccacagactttcgtgggccacgtcagcttcttcaaagaggccgacttctcgccctccgtggcctttgcctccctctccctcttccatatcttggtcacaccgctgttcctgctgtccagtgtggtccgatctaccgtcaaagctctagtgaggtgaggggagggtccgggcgagggcactgggcaggcaggtcctgtgtcagcctcaaggcttgctcgagtgatggccaaaccacagctgtttggtcccggaacacacccccattgctgggccttgctgtagctggtcctggttggtcagagggacattggcctgtatggtttcccagctcgccatccctgagcaaggacttgcttacatacctcccaggagaggggactcactgtcactttcacgacaacttaaaaaaaaaaaaaaaccagtgttgagccaaatgtggaatcctcctaaattctacccactggtcctaacttcaccctccagagccaccaagaatgaggccatcccgtccccacgtggctgccccatggatatcagaaggcatccactgtgtctatctttcccaggccaagtatcccctaccctttccacagcccctgagccctcacagcctcagccagtgaaacagcttcccccaagcgctgggtcctgctctgattggcccacagctcttggaggctcccacttccaggctctagagcctcatggggactctgccactgtcccagaggcattgccctcttgggaatgaaagcctgaaggtagaaggctgaggctttggctgggaaatgccctgtctggagtgagaagatgtccttgggcctctgaagtagctctgcctccttgaaagcaagagcctgtcatgcctctatggagggctggcttgtccttacccatggccagagaaccagtcagtaacaaatgtcctctgtgtcttcagccttgaggaaggtgacacccctgtctcatgggaccctggcaggtactgggaagctggaaggaaggagtagctgttggaatgaagtagctgatagagagggtagcttgcagggggagactctagcatgggttcaaagatggaatggggcataactcagcaaaattatgctctaaggagtatctgaccaggcagtagctggttaaacagggattagctcccatttccacagtcggctgtgctgactcagtttcttgaccagggtgttgtggggtctgaagatcacccctcctcccaccacccactctccagccctatgattctgtgtagaaaccacagatttaagaacgctgcacctgcctgaaaactgttgcactgatcccaaagcgttcatattttcaaacactctggatcccactgtttccaggaatggaacaccagagtagcagaggccttttcagtgaggcagctcaggctctggctgaaggtgggcgcaggacactacctgaagcttcaccccaagagatgagggccagctccactcttcccagtcaccgcctgtgggggagggaggctggacagggcatgaaggcagagcctggtggtctgcccctcccatctaggggtggcgcacagaaagggagactccaggccacagctcacttacaccccagaataaccttgccttgagggtgggatggcttgtctgccccaggcctgttggacatttagcaaaagagaagaaaggggaatacaaacaatcctgagcttcccagaaagctttcacacctccaggatgggagagaatgaactagaagagtgaagcttccagtgcttcctcaggtccacagggaaatctggacaggggagagggtaggaatagccgcctcccccgtgagtaatgacacctcctccagcaggctgttatggggatccgattacataatgctacaaaacagttaacacagtgtctggcatttagtgtatgctcacaaaatactagctattgattctttaccaatcctagtcctaactaaccttaaccctgaccaatccaacaccaaccatccttcagtctaataacccagactaactaacttcaacattaaccctaaaactaaccaatctcacctccaatccagaccccagcctattccagctgactggtcaaccctagcaaaccctggtaacaccaattacctgcccccatgcccactggtctgcccccttcagtgtgggctttgtgggactatacttcaggcctgagatcctgctcagagctctctatcaggctgcgccctctcccctcccctctgcccctggcaggggtgaggggtgtctctgtgcttcccgagcagcgtgcaaaagctaagcgagttcctgtccagtgcagagatccgtgaggagcagtgtgccccccatgagcccacacctcagggcccagccagcaagtaccaggcggtggtgagtgcccggcctccccttgctactcccagcatggtcctctaaggcccaaaacttgggcctgctgtgtcggacttctgccttttttcccaggaagaggggctcccttccctacacagctcccagcccagtgggtcctcacctccaaaccacccccagcccctcagggttgtgaaccgcaagcgtccagcccgggaggattgtcggggcctcaccggcccactgcagagcctggtccccagtgcagatggcgatgctgacaactgctgtgtccaggtgagtcctgctgccccatgcctggccacccagcaccaactcccagagggagctcagcacctggaaagccagaaagctgcatgcttagtcctctgcagaggtcaccctgcctgcctgtacggtccataggagtccagaaaccagggaccaccaagtggggggacccccagccttaggcaagggtcagcatgagaaggccagtctcccactcccctgctctggaagtgatccaggggctggaatcagtgtcttttggctttcatggaggaggggaagccagagactattcactgggaactggctgcctttctgttctctcctgggcggtgggacacgcctaatgaagatcatgggaggctacttcacgtggaccccagatggaatccccacactgtccaacatcaccattcgtatcccccgaggtatggcccagtccacccctccagcatgcccctccccatgtcccactgaataacatagagataaaaagacaaagctgcatttattgagcacctactctctgctcattcttggtgtatgccctgggtatattatagaaggggaaggctacattctagaggcttccgtgtgctgggtgggagtgaagcactaaggacagggtaaaattgccagccttaatgtcaaaccatccattgcagacagtataggtaatgcacaaaaagatcagaagtgggtagccaaggaacgcaagtggaagtgatggggtttctgagaatggacaaaggccctgaggccatgaggcaggaggattttctggcagaggcagccatgagcaaagtatggaggtgggttggaggtgggacccaggatggtgtttcttgggaccacaaggagcctgggctcatactaggagcatgggaaaggagaagcgagtgcttaggaagggtggcggggcaggaaatcagagagggggaaggacctggggagccagaggaggatgttgatttccagaaggaaaggattaaagagggagaggacttgctggggattctaggtaggaagaaagaaaacaggggccccagggttgggtgcatctgtctgtctgtctttctgggtaatggttgttcagactcccccggccccactcacatctgccaccctccctccctgcaggccagctgactatgatcgtggggcaggtgggctgcggcaagtcctcgctccttctagccgcactgggggagatgcagaaggtctcaggggctgtcttctggagcaggtaatacatgtatcctcagggcccagtggaggggaaatctccttttaaccatcctcctcagttgaggatgcacacacatttattggagggcccactctgtgttcagtgaggactcaataaatgctgctaatggatattctcatcatcatcactagtacgtattcacctcttactatgcgcaggttctttgctaagtcctttgcatgcattatttcatttaatttttatgataactaacaaggtccatactgttctcaattctcatttatagaggaaggttaaactatttgtcctaattcacacagctaataagtggcagagctggaattgaaactcagttctgtcagactctgaatcccatggttactcagatgcacggcagtaatttcccagtgtgggaaattgcaacaccaacattggtttccagcttggtcctgagctgcactgacctacacaccataagtgggtgttctgaagatccagatgtaaccaataaatgttggtttctgggcaaagatcactgtcttaattaaagagccagaaccccaggctcagtcaatcacgaatctgttatttatacccacctacttccaagaagcacttgaaactagttgatgaaagattcatgtaaaaatcaaaaccacaatgagataccatctcacacccgttagaatggtgatcgttaaaaagtcaggaaacaacaaatgctggagaggatgtggagaaataggaacgcttttacactgttggtgggagtgtaaattagttcaaccattgtggaagacagtgcggtgattcctcaaggatctagaaccagaaataccatttgacccagcaattccattactgggtatatacccaaaggattataaatcattctactataaagacacatgcagacgtatgtttattgcagcactattcacaatagcaaagacttggaaacaacccaaatgcccatcaatgatagactggataaagaaaatgtggcacatatacaccatggaatactatgcagacataaaaaaggttgagttcgtgtcctttgcagggacatggatgaagctggaaactatcattctcagcaaactcacacaggaacagaaaagcaaataccacatgttctcactcataagtgggagttgaacaatgagaacacatggacacagggaggggaacatcacacactggggcctgtctgggggtggggggcaaggggagggatagcattaggagaaatacttaatgtagatgaagggttgatgggtgcagcaaaccaccatggcatgtgtatacctatgtaacaaacctgcacgttctgcacgtatatcccagaacttgaagtataataaaaaaagatgcatgtaaaataaaaccctttaaaaaggtaagaaaataggaactgagaaatgaagagggtaaaaagatgttcagcaacctgggcagaggacaactacagccatcaacataaaacctggctctgtgccctctggtagccaagggaaaaagggatctctgggctttggagtattcatttaggaataaaagttgcagccaatcagcagaagggcaagctttccctaccaatcatttctaggggaaaattattgaaggtgtcaggtttttcataagcatgagtacagaactgagcagggagaaagactttgggcccaatgtctgaatatcaacatgcacccccgtttcctgcatttccaagatgtccctgaatggtgtatccaaaagatggcaaatttccctcctcagtggggtcgtgggctagcagatgagccccttgggtttcccatcacctcccatcagggactgtgatgtctttgggggcagaggggtctttgcctccattcgccattttatttgggagatttttcaacatagcctgactgggaaggcccaggtattcggtttgagatcatattgccttattccgactgcctctccagcctttggagggaggagcccttttctgctgtccaactgcatgcctgcagcaagaagacaagagtccccagtgcactgtgagctgaagaaagtaaccaatatttattgggtacctcctatgggccatgccctttgctaagtgcattgtcaacatgatctcatcaagcctcctactaagtttaggaggggagtgttgttaccccatttcacagaagcagaaactcaggctcagagaagttgggtgacttactagtcagtgtgtggagcagagactctgcccatgttctttccctcaaacctggtcactgctggggcccccagggcctagtcctaagggttattgtccaagccccatgtagtggtcaggctggatctgggctctcctccaaggcagggcttttccagaaggattgcagggctcagacactggagctgcccctgccttgacctgctcagcatggatgtcaaaacccactctgaacctggtccctttgccctgctttcttctcctcccccaccctcatgccctcatgtggcatcgtgcctgcctcaggagctctccttgtcctatgtagatgaagcaggcatgattggcaggggtctgctctgccctgcctcagtccccacctcttctccaagctgtgccaaccctccgggtctgactgctgcccctctctcttaggaaacctctgccccagcccagggaacacaaggagcctctccaaggcagaggaccctaagcacttcttttttttattattttttattttattttaggttctgagatacatgtgcagagtgtgcaggtttgttacatagctatacatgtgccatggtgctttgctgcacctatcaacctgtcatctttttaagccccacatgtattaggtatttgtcctaatgctctccctcctcttgcctcccaccccccgacaggctcggtatgtgatgttcccctccctgtgtccacgtgttctcattgttcaactcccacttatagtgagcacatgtggtggttggttttctgttcctgcctaagcacttattataggccaggcactgtgcaggcacctcatcatctcagtcagtctgcaccgaactctgtgcagtagatattattatatcctcatttatcagattaggaaactgaggtgaagcaagttgtccaaggccacccagctgttaaatggcagaagtgggatttgcacctaggtgctcaagtgcattggtttgccaccatgtgctcaaagagaaggggcacaagagcctcatgaagaaggcatagctagcctgacagtccaaaggccagcagccgctgtggccatgactcacacacacctgcctcctcccagaactgccacgtgggtcctcacagctctgtccttatcaacacttactctcctttacaggtagcctaggccccagctcccagctctgttcgaggctcgcagaggggcggtagtgaaggggtctcatttctccaggatcctctttgctctctcgcccggtcctggtccagcttccctttcaagcatagtgaagtgcatttgttagcttgcagccaaccctgggaaatcatgagaatttgttcccaagtcaactcattctccagcgtccacagtgacgtattcactcacccagttgagcgcctagtgtatactagaccctgtgacagcaacaggagtgcaaaggtgactaagacgtggcccctgctttttttttttttttttttttttgagacggagtctcgccctgttgcccaggctggagtgcagtggtgcgatctcagctcctcacaagctctgcctcctaggttcaagcgattctcctgcttcagcctcccaagtagctgggactacaggtgtacaccaccatgccggctaattttttgtatttttagtagagacggggtttcactatgttggccagggtaatctcgaactcctgacctcatgatccgcccgcctcagcctcccaaagtgctgggattacaggcatgagccaccacccctggccggccccgcttttaagagaggggagagaagacctgggccttagaagagctcagaggaaccacaattgactctgcagtcaaggagaggaggctcactgcggatgtggtatttgagccttgaaggatgagtgtggtttcatcaagtagaaaaggcagggatgggaaagggaggtggtccaggcaggggtgatggtgtgggcaaagccttgctgatattaaagaacatagttctgtgcacctggaacactggatgcatggggtgcattatgaaagatgggactgaagaagtgaacttggcttagatcccatgtagtaggtctgagaagtaagatttaacccaaaggttgcaaaagaaccatgcttgtgataaaggatgatggattggggaaacagagaaaaagacagacagactgtaggaagggaggtattagcaaataatcataacacagtgtgaggtgtgcattaatattcactcattccaagtattgatcaagaagagaggtaggtactgggttaggaaacagcttgggcaaatgcatggggaaatgagagatgtcaagatgcattctaatggcagcctcttgaagatcttaagttgtttttggttcactcatttcgcaaatgaattcatttagcaaaagcactatggatacagtgcttacctctaggaagtaagttttagcccaaatgctgcagaaggatcatgcttatgacaaaggatgatggactggggagagagaaaaagaaaagacagacagactccaggaaggaaggtcagtctgcagctccttatagtggctaggagaaggagtctaggcagatacgactcaattagcttcatctgctgtttgtctctcaaaatctagacatgtgcactgctctggctggcccacctatcctgggcattgagttaagtgtgggggctgtgtgttgagagtccccctccattactggcaggaactccacacctcagacattgagccccaggtctgcagggagaagacgtgcttgcaaagtgagctaaaagcaaaacagcctctgacctggcaagcattcccaagtctgcacgcctgcagccagaggagagggtgatgccaggctgctgctcagatgcttttcagccatacccaggccaagacctggtgaccaggcagccagaaggagttccaggaggcacaaggcaggaagttgggggattaggaggtgtagaatggagaatgctctggggagatgggtgctttgttggtgcaactattcgtttattcctccagtgaccacgtgagcagtatggctgcacacacaggctctgcagccaagctgcctgggttcacatttggtctctgtgctttggaaaatttcataagctttctctaccagtttcccttattacccatgagattgatgtgaggattaacctagcatgtagtaaatatcctataaatattattattcaatagtgtacttctttgccaggaacaaaattcacctgttcctctttaaatgtcctccagtctgtctcctgggaaagattcttgtgagctccctggggacagggaccatattttgtttgtctcactgtatccgtagtgctttttgctaaacgaattcacttgctaaatgaatgaaccaggaacaacttaagaccttcaagaggctgccattataatgcatcttgacatctctctcctttccacatgcctttgtccgagctgtttcctaacccagtatttcactacccctcttctccatcaatatttggaatgagcaaataccgttagtgcatacctcacatggtattataattatttgctaatgcgtctgtctcctccatgactctgagctccttgagggattattccatgttgtaccccaggtgccccatgcagatgtgtattttgtgcactgttctgtgtaggctacaaaggaaaaggcctagcacctgcccttggggagctcacccacccaggatggacagaggtgtgcagacagagctgcagggtgggcacaaagggtccatctgctgaagtcctgcagatgcagccccgagcttgtccctcacgtcagcagcctggctcctggtctcagagagaactgtgtggttcccaagcattcactttaggaagaatcacttgcccctccctggctctctgcttcaaggaactgtgacaaccttgggatttgcaaactctctctttaatccttaagaggaaaatgttttggtaaaaagtcaagattagcagatacactcgggtgaaattctttccctggaaataaagaatagagccattaatatccacagtagagtgactttaaatgcccccggggggtcagcaggaaccagggccctgaggaaaggatcagcgtggggaagaggctcccacttccctgtgaggagctgcacatgcagtctcactggagctccctgctgcaatgctgttgcctgtggtggttggtgtggatgctgcctgccaagagccctgattccccaggaagagagaaaaaggcttctctcaggacggccctggtcgcatctgcctgtacaattcctggagcctttggggagctgaagtcaggggctcaagtgcccctgggtttcctggaggaggcaggtgtggtgagacagctgacagacaggagaagggatgctctgaggaagtgactgtccagccatgggaaccagatggcccctggctgtagtcctgatgctgccacttgctagctctgtgaccttgagcaggttacttcacctctctgagacagactcactgtctggacaatgagtaaaaccctacctttcctgtctcagagatttggcaatgggacccaatgacatcaattggaaaggatgctgtgggtgaaaggtaacctttcaggacagcgacaagcctgtctgggcaggatgaatgggctgtggagccctgtatatcctagctcactctttgaacctcagtttccacttcttccctttttatttattgccggggtcttaaatgagtgttgggggtatctgattctccctctgcctgtacttttggggccaagcactgagctgaaaagacaattcctcctagttctccaagcctacaacctgccccctaaccagctgtgagctgtaatacattctccagtgtcactgtgaggtttgtgccttcacccccattttatagatcaggaaacagaggctcctccaagtaaaggagcttgcctcagatttcacagccaatgagtggaaaagcctctgggattcaaatgtcagagcccatatttttcctacttctcgcacctgttatcatatgctgcctcttcctttaacctgcagttccctcccttcacctccaccgtctcaatccttcccactctttaaggttcagttcagctatgacttcttctatgaggctctactcattttctcagatttcttcctcctccaaatttcttgtaaaaattatgttttttctctgattctaaaagaatgcacattacattagaaaagatacacaagcatacagaagataaaaaccacctaatatcccatcacccagaagcttccagtttttctttatgcatttgcatatgcatttgtgtttacttttccccaaaagttctccgatactttgtcctacttttcttttgacccttataacttcctgacttcggtacctttctgatttgccctaccagagtgtgagcccctggaaggcagcctctgcaccctgattcaggttgccacacatatgccagctcctagtgggctggagggaaggacatgcggttggggaactggaagactcatgctttcagctgtgtgcttcctccctagagtgcaggcagaggaggaatcgaatcccctcagcactcttgtaaagaccacagcaatgagtgagagatggtgcctgccagacataccattctttacttttcagcttaaaacagatacaaagtttggggaggctcactggaggaggcttggggctacactggaaagagaagaacttggattcacaccccagcttcccctcttcccagctctgtcacatttgcaaactctgagtctcagtatcctcatgtgtaaaatggggatagggtttatagggttgtaaggatgagatgatgagttgtttgcaaacaacttctcacagtgcacagtgaaggtcagcaatgagagccagccccgccctttcttctttccaaatgattaatatatctgttaccagcctccattcattatatagctctgtcatgtgctaagcaccatgggggctgaaaaagatgttcttcctgccttaaaattccactggggatgaacaaattacacgggagctgatcagagaggaaggcagtccattatgagggctaattgagcagtgcagaccatgttgcaaactgagttagggcctggagagcttactgtgtgctggggtcctcaggaatgccacagatgcatcaataaccacctctgctactctggaagtagtcacatcaggaagactccagagataagcttatctgggctgtggccacagagctggaatttgtaagctttaggtttctatgtctcatgttaccagcttgtctataaattgtaaattacagccatctgatggttagggaatatgaagtttggttaagagaatgaaatgagaccacgaagattagagaacaggaaaagaggggactggggactacatacccatcagaatcttcattcagtcctgaccctcagcaggagggggatttcatcaggctcatttccatccttgatttcgtccatcctggttctcctgacaaggggcatttatcagagttatggcatgggaaatcacaggggagtaatgtaccatggcatttaagagtatgaacgttggagtcggagctattttctccgctacttactagctgtgtgactttgggcaagttacttagcctttctctgagcctcactttctttatctgtaaagtgagggcgatcagaataaacctccttcatatggttattttgagctttataaagagacaatactggctgagcacggtggctcactgccagtaatcccagcactttaggaggccaaagctggaggatcgcttgagcccaggagttggagaccagcctgggcaacatagggaatgagactcctgtctctacaaaaaatatacaaaaattagtcaggcatggtggtacgtgcctgtaatcccatctactcaggaggctaaggcaggaggatcgcttgagcccaggaggtggaggttgcagtgagccaagatcacgccattgtactccagcctgggcaacaggagtgaaaccctgtctgagagagagagagagagagaaaatactactatggtgcttataaaagttcaataaattttagctgttgttagtattattaaagtaagatctgtatgaaaataaagcagattttttcccccaaatgttcatgtcagaagtatatatttcattggcaaggggctgcttctggaaggttgagaggtatcctgggggaggggatagagcactggcaaaattggcatcacaattcaagtcacctcactcagtgttttttaagttatcaaaatccacagtatgaaaagcatttgacattacagtccactatatttatgcatttataaacaagagaaaaaatcacgaaaaatacagtaccacgtgcagtacacactgattccatctattctttttttttctttttcctcaaatgcacttgccgcctacttattccagacccaatgattgggtccctatccacagtttggaaaacactataagaaatgattgtgtcctctcactttccctctctgggatttagttttccaactataaaatgctcctgatgcccagccagcctcaccgctgctccgagtcaatgccaggaacgctgatttagcacatgctatttggagggtacccatccaggtgctgtgggagggacagagattgagaagagtgctttctgaccccacagaggccatttggaaaccctgggaatgggtgggagggttggaggtggggattgcttctcccctaagactcagcgtgatggaaaggcaatggggtgggaactaactggtgttggtctgtcccatttgtgtcccagcagccttcctgacagcgagataggagaggaccccaggtacagccttgggactgggtcagaagtgggtctcaacaaagggaaggggtagggtgggggtggaggacttgtgggtgggtaatgctgagtatggattcagggatgtgcagcctacatattttcagagacatggggctaaggcctgcattctcaatgagggcaaaatttggttcttggggacagaaaacacttagacattgcaatgctttgtggctgtccaaagtaccaaacagatgccagtatatctgtggtgctgaaatttcatggtgaatggagtcagaaaatagactagcgattgccagggtctggtgggagagagagggaagggactgccaatgtgtatgggatttgttttggggaagataaaaatgttttggaattagatagtggagatagttgcacaacctggtgaacgtacttttagtttcagaggttttctaaacctctgatttttttttaagtgacaggaaagacagaaaaaagtatatctaaaaaggctctaggggtgatcatggaaaagaaagttaagaaatatgactgtaaggaaaggagatgggtgtccctcaggccaggcagaaaattcagtcttgttgctttatgttcatgtgcaaatctaaaaaatccaagtgatatagattaatgaggctctgagtccctcaaaaccttccctccccttacctctccaaaaaacacttgagataccctagaggtggtatgaagtcaggatgggaaggttggctcagctttgcaaataagtttaagcctctggcctttgctctccaacaccaaagaggcttcactttggtatattttctctgccctttctccctccttgtccccaactgtcagtatgtgatgacaggctcagcctctgtaatggtagtgatcatatttcttgagccaaaaatcagacctcatggcatgtgacaagtttgcatatgtggatgagaacagagtggcagaatatttgacacgggagcagcttgggcagtccagggcacatggcactgcacctgacatccctggcagatcccccacattccgtggttgtcttctgatggggccatatggggctgcagatcatgcctggagccctcgcagctccagggctgcgggttcccagccccagagtgcaggtgctggtgtcagcctgcctggcctggcctggctctgtccagagcactccttgccccagctgtttgtgcagctgtatcagcctcagacctcagcctattcattccaacctgaatgcagaggctgggtctggaggagccacattgcgggcttcatactcctgatctgacaagttttccccccagagcctgcaccaatggcacctctccccattctccctcttaactgggtcctccagggccctcctcacacacccacgtggtcaggcagcagaggcttccccaagatgggcacaccccactctccacacctctctatgcagcatttgtggctacagactgggtccaggggattgtaaaggcatgctcatgttgggttggagggagctcaggatcttcctggaggatatggttcactcccatgagagctcagtatgcctttcctcccctgctgcagcccagagcgggagacagcgaccgacttggatatcaggtactgcgtcctgggaacattgccccccagggtcaactccctccagggtgctctcaggcccaagggagccacatcaccctgctgggcagcccccagaccccagccccagtgttgggggaggccagggagggcccctgtgctccaccaggtggctcgggagctgctgctgtttctgtgcatccatttactcccttcacataagatcatttttatctgggatctctttttcttttttcttcaaaaaccacatcactcaaaatgtggcttccttggctctgcttttaaaaaaaaaaaaaaaagttcttccatttggagaattacctgctgacttcaaagtccagtggcttgagggctacccaaagagggaggaagccagaagttgagtgttcccttggtttggtcacacttttgggctcctccctgactaaggaacaacagactgcagggctggggcaggctgggtgtagggcagggaggggatgaggtcctgctgccccagtcagttgagacccagacctctcaaacctgcctgggggaaggcaaggccaccagaggccacactaagcagatttctaccaactgcacctccccatccccttgcctccatctgagccatcagcttgacaactgcctctgagaacaagcccctgagaatgccttccgcaccccctactcccgccctgctttttccaggaagagaggccccgtggcctatgcttcgcagaaaccatggctgctaaatgccactgtggaggagaacatcatctttgagagtcccttcaacaaacaacggtaaaagcctgtcggagggaggcaggatgtggaggggaggaactgtctctggccagcctgccccagttccgggcccctccatcgatcacccacacccagccatctcactccccaggtgcttacctgcactccagcctctccatatggtgcacctggagaggggccaggtgtgcctgagcattggggcaatccagctcccataggggagagggcaggaatggagggaagggagagagccccgctgccttttctctagctggtgggagggctagctagctctctctgtgagtctccattcgcctggctcctgcactattttccctccaatgataatagttagggctagcatcgactgcgctcttactacataccaggcacagtgccgagctctttgtacacggaatttcctctcatgcttacaacaacctcagtaggtagatattattgttattcccactctacagatgaagaaccaagtttcagaaaggtcccaaggccacccagccagtaagtgaccaagatgggtctcaaatccaaagctgcctaacacctaagtacatgtttgtcaccaacatactctgatgcctccatgaactctggctggcacctgcccaggctaagggctggctggggaagtatgagaggaacaggctgggcaaatatttgaccagccatcatcattactgcctaaaccaaccagcagtggttttccctgcagtgccccaagcacgggttccggctgcagcttttcccactgcacagagatcatgagcgccctttcatcacttactctgcatatttgttcccaaccaattccatccttctagtatttaacctgcccaaacgctgtgtgaagtgctgacctcagctcttttcaagctcacacggtgtttgcttgcacccaagcgggaggcctattaaagccattgctcaccctgggcatagctacccagagactaatgaccctctgcaagtgctcgggccaactctgaccaggctgaccagctgcatcccctgcctctacccacgccaggtacaagatggtcattgaagcctgctctctgcagccagacatcgacatcctgccccatggagaccagacccagattggggaacgggttagtagcagcctctgaggggttttttcaaagccaggacccccaacctaccatgccctgagacactactcaggacaatgggtaactaggaaataggagacattgaaggctgaagagttgcctgcagtaaggtcaaacatgttgttcttgatgatgtcctttgacaggttttcagtcctgcttggagggcaaggtcagcttagtgccctcccaggctggggatcttcttcatttgcaccccaggtatacactgagagcccacacagcactgtgctcagcctggggttgtattgttcctgttcatcctccagatggggtcccctccacaagcttagacgaacaggattctcctgtgactgtcctccttttgtgtgattttaatccctgctgcctctgtctttgtttgtactggtcagatggtccctagcgcctacacaatgaatctttaaagacttggggctcatgctgccctcttctgaatgaattcagtaaacacgtgcaagttccttctctatgcaaggtgagaagcaggcaaagaagtggatagagccaggcctccatcccaaagagctcatagtccagtagggtacaggacagtgtctcctgaatggctgagggcatgatgtgttcctcctctttggtgacagggcatcaacctgtctggtggtcaacgccagcgaatcagtgtggcccgagccctctaccagcacgccaacgttgtcttcttggtgagtgcaagttcccttggggtcctggtctctggctgcctcccaggcctaactgcccacctccacctccccgcaaccccaccatcatccaacaatctccctctccaggagtaaatccctcctgccagagatattgccttatcatcctagtgatagggaaactgaggcaggcaaggatagcacaaatgacccattgcagacttcagatggagctctgcagtagccaatgaggagaggcaagctgtagttataggctgcctgtctgtgggacagcccaacccctcaacacttatgcagcccgactataagaatggctgataacagaatgtgtgctgccacttcccatcttatgcccagtgcagacattgctaattgttcacagcattatttcccatggaacttaactcatcctcagaatccttctcaacacagcactccaggtaaccactagccatcaaacatgagataaaactaggccaggcgcggtggctcacgcctgttattccagcactttgggaggccgaggcaggcggatcacgaggtcgggagatcgagaccatcctggccaacacggtgaaaccccgtctctactaaaaatacaaaaaattagctgggtgcggtggcgggcgcctgtagtcccagctactccggaggctgaggcaggagaatggcgtgaacccgggaggcggagcttgcagcgagccgagatcgcaccactgcactccagcctggggacaaaccgagactttgtctcaaaaaaaaaaaaaaaaaaaagaacgtattcgcaatccttacactacttcatgtcaagttctgttgtgtcaggtgccttgactgacactgaagaattctaagaaccagtccttggcctcaaagatttagaatctgattagggagacagagctcacccagttcaagaggcccagcccggttcaaatccaaactgtgcggcataaactatgagggggccttgtccagggagacaactgtgagggctggagtaatcagggagggcttcctggaggagagcctcaaagggagagtcaattaaacagaaggaaagagggaggccatttgcacagtgagttggaagaaggaagctcaagtctctgattccagctttattccctcccctctccctacaccacacgcacaagcactcctttactaaagacacttcacagtgggaagattcagtctccgttaccgtctgacacacacacagcgttttacaaagcatgggtgcattcgcgatctctcatgagatttaaacaaccctgctagagaaaagtgaagtggacattttatttcagtaaacgtttatgaagcgtctactctgtgccaggcactaaacgtttatgaagcgtctactctgtgccaggcacaggcacaagaagtctcagttcttgggagtgccataatcaggaatggacaaacaatgatcagatctggctttgcgccagtgtcacgggaatagggaggaaggaagggtaggcgtgggggtcaggacaggatgcaggaggaactggtgcttaggtgagcgaaggatgggtgggagttcacaaggcagacaaaaggcagagcagcactccaggcagaggaacagctcaggagaaggcccagacggcaggcttcctgggaacctggaatgcagagtgctgggaaagcacagatgaagcatgagtctagaagggaaagcgagaggttataaagcacctggaacaccagcccacagggtttgactttagagatgatggggagccgttgaaggtccaggagtcaggcagtgaagtgattagatctgtttgagagtgatatctgacaactgccccattttaaatgaggtaaccaaggcccagagaggttgggtgagttgtccaaagccacacagctaactagcttcagtccctagagcagagttgatagaactctaatgggttttatactcattgtcacccctccccaccatgcctttccctaccctctactctcttcctctcccttctgcccaggatgaccccttctcagctctggatatccatctgagtgaccacttaatgcaggccggcatccttgagctgctccgggacgacaagaggacagtggtcttagtgacccacaagctacagtacctgccccatgcagactgggtgagggggaacaagggggtcaggctatagggggcagggctggggaggctgtcaggcatcttggcaggaaccaatccgttgtcttggtagcaactgctgagggccacaaagcataagagaccagcactggatggctttatgcatgctgggcatttcagggagaccctgtacaggccaggggtttggtatcacctagacccacagacactccccatcctggcccgggccccccatggtacactcaaggctggcaccaagaagtctcaggaataatcaagtgctcacttctcaccttctgattcctgcccttttgatgacccatccccgcagtcatggggagtgcccatttggatggaaaagccctcttcccaccctatgaccttcccggggtggatggatgcaccaccccgggaatcatatgggaaatatggaaccaaacaatagcagtagtaatagaaacttcaggctgggcgcaggggctcacacctgtaatcccagcactttgggaggccaggacaagaggatcacttgagcccagaagtttaaggctgctgtgaaccatgatcatgccactgcactccactacagcctgggcgacagagccttgtctctgaaaatttgaaaaaggaaagaaagaaagaaagaaacttcaatattatcagtagagtccaatgttgtgaaacccctcattaactaaatttccatactcttcagtaggtagaaaataattactttttgattcattagaaagcacttaatttttaagatggagatcatgtaattttgaactctaggtcttgcctactcctatataaattctcctctaaacaacagccaaaattgaggccctctttgagcttcaggctggtgccaaatggctctgcttattttccccaaaataaatcttccttccatgtatgatgagaccccctccagtataaagaagacccaaagaaaatcacccaaagaaaaaaggcccaaagataagacccaaagacctaaagatttaaatatatatacagatacagaaggtttgtttctgagtttctgtagtgaccttggcaataccttgtagttcaggacaatcctgaggaacacagaagtgctggcttccttgaggaatcagtgatcaggactctcgagccccttgaaccccagcatagggcgggagggggtgagggcagcaggggtgggtgtctgaattaatgtcaggtctacgtgatggtgtcatcaagtgttccagataaaaagttttattgagccgggcgcggtggctaatgcctgtaatcccagcaccttgggaggccaaggcgggtggattgcttgagcccaggagttcgagaccagcttggggcaacatggtgaaaccctatctctataaaaaaaaaaaaaaaaattagccaggtatggtggcgtgcacctgtggtcccagctactcaggaggctgaggcaggaggatggcttgagccaggaagcagagattgcagtgagctgagatggtgccattgcaccccagcctaggcaacagagtgagaccctgtctcaaaaaaaaaaaaaaaaaaagatttattgattccaaagaggcatggccacacacacttagaccagcaggtgctttgctaagccctgatggaggctgccagacccgccgtcaagaggagctaagggtagtgtacaatgagcccacttagtgtatgacggccgctgccgtgggtggagtccttgtgagtaaccagccagcttgagcaggatgcactaatttgctctgcaaacccagccattgagaaatacgcctcagatgtaccgaactctaggtcctaggagtatgttggttggggtaggttatcaataccagcccacttgcagtggatgagctggtggccatttgtagtgaggaaagggatgtgtcaacctccatcttagactccacaattgagggatgtgaccaccattcctccccagccagcccccaaaccacgtttgttgctgcctttccagatcattgccatgaaggatggcaccatccagagggagggtaccctcaaggacttccagaggtctgaatgccagctctttgagcactggaagaccctcatgaaccgacaggaccaagagctggagaaggtgggtatatccagggatggccaagcagccacccctggatgcaaaggttctgctagaacctgaactcataaaggtcttcctgtccttagtgccccaggaagccccctaaagggcagatgtgggagctgggcatgaactggctcctaccagaggagagacagtacctgtgccaggtgcccagggcagaatcaggtgggcaccttcgccttatcctgaggtagtcagatactatttagttgcaaagtttcagaaaatcaactcaaactggcaaagaaaactaagcaaagaaaacaagagggaattaaggatttattgacccatgaaaccaaaaagtccaggtgtgtcatagctttaagtgtgctggatccaggtagtcagtgtaatcagaaatctgtttctcccatctcttgactctgctcccctcaaattggctcagctcccctcaaattggctccattctcatggtatcagtgagggccaccagcagtcttaggtttacattctcccagctcaacaactctgccagaaaaaaagtgcctctttccccatagttcagcaaaagtcccagggctgagtctcactggtccagtttggtcatgtgcccacccctgaacaaatcactgtggccagcggtgtggaatgtgaggattggcctgtcctgggtcacgtgccactttgggagccagatccacctgaatcacagagactaaaaacaggggaagagtggttccccacagggatatgggggtgctattatctgatgaaggggaaggactaaatcctggcaagatgaatgtgtgtctgtctgcccctccctcaggcagggacaaagtagaaatctgacattggtcatcaccagagtagttaccccttaacttccccttcccccaccaaccatatatcctgaagacattgcccaggccacatctgtcttttaggagactgtcacagagagaaaagccacagagccaccccagggcctatctcgtgccatgtcctcgagggatggccttctgcaggatgaggaagaggaggaaggtacaggcaatgggactgggagtgaaattatggcctgaggtctgatcagccacagagaggctaaggtttggggttctgggtgtggtgcagtagtgtgcctttgattaaatggcttccctctgtgtgcccccgttgtcccctcagtaagtggggataaaatgccctgattcaccctcagagggatggaaatgtgtagccacagagtgggttcttgcggcctgcagaggaggcagctgagagcgaggaggatgacaacctgtcgtccatgctgcaccagcgtgctgagatcccatggcgagcctgcgccaagtacctgtcctccgccggcatcctgctcctgtcgttgctggtcttctcacagctgctcaagcacatggtcctggtggccatcgactactggctggccaagtggaccgacagcgccctgaccctgacccctgcagccaggaactgctccctcagccaggtgtgactggcggcccatggcagaggttgggagtggggatgggggaagggctgagcccatgggcaccctggaactccaaatcactctctgcctgtgaaggagtgcaccctcgaccagactgtctatgccatggtgttcacggtgctctgcagcctgggcattgtgctgtgcctcgtcacgtctgtcactgtggagtggacagggctgaaggtggccaagagactgcaccgcagcctgctaaaccggatcatcctagcccccatgaggtacccgtctcccctggccaggctgggactgtgagcaagtcactgttctctgagccttagtcttcccatctataaaatggggatatacaacctgtcacaagcttgtgggggtgactcaaggagacagtgtgtgtaaaagtgccctccttgtgcaagaagcagggagaaactggcatttactcagccagatactgtgataggcattgtgtgtggttagctcatttaattgttaccatggccctttaaagtgagcgtctgcacatccaagtaaagattgttttctcctccctaagtgggtgtaatttgcccatccccacccatgagttcagctccctgccctcccctcactctctctccctcagccagcctcaggttttgacactgggggaacaggtagctgttctattaataatttcctgtaatgggatggataaaaatctcaaaggccacttgatgtcaaagaggtttaaagttgtccctgcccaattggttggccaacttggcttaaaaacacaacaggcaaacagattttctggccccttgtcgaggctagacctcacaatctaactgcactttttactttccagcctcatgagttttctgtggcccacagatatggcctccaagtttatttacttttactctctatttgccccagctctgtagttctgaaactccctggttggggttgggctgactctgggtcagccagccggcaggctgtccccagggccctgttcctcttggcaggttgtccctctggagaggactctgtgtcccaggaggacagctgctgagtcaggccgagccggcagctgagaaaggcggcagtcgtcagatgggcttgagaaactgaaaggctaacgaaaggccagcgcccctttgggcagctgcaggaattcacggggatacaggccagatgtctacaaattggcagaggatgccagacccatgaatgactccagagacacttacatgaaataattaactatctcattcagtaaacaggaagtaaatcaatggacaaatgagtaactcttcctctggctgcctcttaggttttttgagaccacgccccttgggagcatcctgaacagattttcatctgactgtaacaccatcgaccaggtacagaggaccgtgccacactatccccccttccagagacacctcggacccctgggggcttctcctgtctgaggctgggttccccagatcaggtgatcacagccctctgggaagaagccagtgtccccgatccgattataatgctgcttcagggctggggcctccctcgtgggagcctcacagtaaggctgagggaaaccagatccctttagcttccacctgagatcccactggctttctctagtaaagttccagcatattctgaaccaaggtggctgattgtatggagaatattcattttgattcagcctgtgttctttatttaccattgtaccagatggtgtgaaaacaaaatcttgattcctacctcagggagtttaccttgtagctggagagatgagatacgtgcctataataaagggagagcaaggccgggctcagtggctcactcctgtaaccccagcactttgggaggcggaggcaggcggatcacttgaggccaggtgttcaagaccagcctgatggccaacatgatgaaaccccttctctattaaaaatacaaaaattagccaggtgtggtggcaggtgcctgtaatcccaactacttgggaagctgaggcaggagaatcatttgaacccaaggggcagaggctgccgtgaaccgagattacgctgctgcactcaagtctgggcaacagtgagactcagtctcaaaaaaataaaggatcaaaaaataaagtgagagcaaaacatggcggccagtagcactctaaacacagtcaataccaaaattcacctcactctctccccctcgtctccctcagcacatcccatccacgctggagtgcctgagccgctccaccctgctctgtgtctcagccctggccgtcatctcctatgtcacacctgtgttcctcgtggccctcttgcccctggccatcgtgtgctacttcatccagaagtacttccgggtggcgtccaggtgatggcctcaggggtgaggggtgggaggtgctttgcaatgtgcagtttggtgtacttgctagactcatcgttatgagagtaatagggtcgtgttccctccaaaaaataaaaacaaaaaacagaaatgaaggaaatagaaatatccacatcttattccaccgccctaatataatagtctgccaacacacgcacacactgaggttgacatctgaattatttccttgggcgatatggtcaggactggaattgctaggtcatgataaatgcacattttatgcccttcattcattttgccaacatgcttcccaggagggttgcatcattctagtggtcaggctgattgctgatgcatgaaatcggcgggcacctgattcaagcagtgttatgataacacctcccagcccacgtgagtccagagtgtagctgtaagccttgacttgagggagcctctcacagccattctcatggatcacatttgccctcatgagctttggatccatgcacgcctctttcctcctcaaaattttctaagaatgttctctagggagttctttctgggagtgattctcccagattcatagaaactcatagattcaaaaaattgtaggaaaaaatttaaagaacgtctaggccagtgtttctcaaactgccaattacagcccatcagtgggtcatgaaatcaatatcatggatcacaaccagcatttttttaaaaatgaaaaaaacatcagactgtattcatagagtaaagcaagctttgcttcatgaaacctttgtgttggtcatggaggtgtgtgagtactgatttgtgagataaaatatatttctgactgcaggttgtggtcagaaaggttaagtacctttcccaagtgcacatagttggctagaaactagagttgagatacttattagcaataataaaatttagatgcattttggacacaattacctgccccaaaggatcaacatttgtataaatggctttttgcttggatgatccagaatggcccgacacccacacgaacaacatagctttttgacactcaaaaaattcaaagtgctgcacaagctgttctacaaagttcatttcttctgccagagaaacagcccagtctctgtggcacccagtctgaccctggagatggtttatcagggaaatcaacttcctgcatcccaaactggcctccctggcactgatgtgcttgtcgaggtgcagctttggggagcaggaggcaattctgttgccatggaaacctctggccttaccccgagacgaaacctatcatttcagcacatcactggccagggtctaaagagctccttgatggggtaagcggaagacggggttgaacgctttgagtttggtcttctgttcctttggccagctgtctcaaggttcagattgttcacctgtaaaatggaactagcactgcctgcccagccttagctcagctccaggctgtgcagcagaagtacagggacagatggcgacctggggttgacaatgcccaggacagcagtaattgtgccccacatcaggctgtgtctaagcattgtacataaacgatctcattcagtgctcacaaaagctcaatgggctggtggcattgtcttcccccttcacggggtaagaagctgaggcctagagaggtaaggccattcacccacacagcggtagcaggtggagctaggcttcaggcccaggccgagccctgagcctgccctcttaactgttccactctgttccccgccacagggacctgcagcagctggatgacaccacccagcttccacttctctcacactttgccgaaaccgtagaaggactcaccaccatccgggccttcaggtacgagtccacattcccccaaggtaggagtggaacaggggtggggccagggggcacaggccatgagatttgattctcaggactccacttgggaaggccaaggacacgttctctctcaagctgcctcaggtcccaaggcccaagggatatccaccagcagggacaggccaggtgggctcccactgaatgttctagagaggaaaattccagctctgtagacaagcccaggacctctgtgaggcagagcatgaaaagagacaaagctgggacaagtcttcatgtatcaacgctagaaagggccttaggtgcgggccaccctaagcccttcttttattaaggagcccctgtgtgccaaacactatgctgagtactgtacaggccaatcccactcattctgcactgcaaccctcggtgctgagaatggtcatttccattgcacagacaaggaaactgaggcacagagacgttctataacctctctgtgtaaggtgccacaaagcccagacttgaacctatttgttcatgcaacaaacatttactaagccccgactatgtgctaagccccatgccaggcactaaaaagatgagtcaaataagccgctgccctgcaggcgtttacagcccagactttgagcaggccaggataaatccacgtgacaagtattctgaaaaaagcggattcaagggctgtgggagcatagaagagagacagtccgggaaggtttttgtaccagaggtgtcatcagaactaggactcaaaggaggggcaggagttcaccaggctgaggaattcctgaaaacttcagtgcccctgccatcgtctcactaccctgagtggtgatgttggggtggacaggagcatctgaggttgcctggggaatgagggaagctgttgtttcccactccccaagagtctgtctgatctccagaggcatctctcttccagtcaggcaggccagagacccctgacacacaaagttgggctcttttctcatcttcatccagagagtgataataggttatttttagggtggcacagctgcacgaagtatgacagtaaccatgagacaccaagcactgtgtccaggagtaaccatagggcacaaggaccagccaagggccagagaggcttacatctcctccccccaacccctgaagtccagcttcagccctggagaggtatccaggcccctctgcccaccctggagcacctagggccagtggaaatccacctcttagggatcttgtctaagtaaagaagagcagagcaaagctctgccctggccttggcgctgctccctggacatcccttgcccctggacaagcctatgctgtgtcttccacaaagaagcttgctggggactggattatgactctagagtctcctcccagcctcctcttctcaagcctgaacttctcccgttccttcaacttccaggtccctcgacattactgagcctagcctttgctctaagttttggtgatttccctctctcaattggtgtctcagagggccctggggtagagagatggtgactcttctagagtgggccacagccccttgtgtgcagatcccagcttcctgtaaacagcctcagatcaggccaaacctgtggtcagccagagccactgctacccagtgaggtcttccacaccctactgacacggtgaatgatttttaaatttgaatgaaaggctttttaatcaaccccatacacatttaatgcattggctttaatccagcagcctgttgagagctattagcacttattgattgcccacttactgtatgccaggcaccgtgctaagtgttgtatgtgcattattacatttaatcctcacaaggaccacataacataggtacgaatcgccacattctccagatgcagaagcgagacccagagaggctgggtaatcaatccaaggtcacacagactgcgggggctggcgctgagcttggaacccaggtttgcctgaccttctgggctttcctaagagatcttattttttcccaaaagagtttcaagagtgcccagcactgggctcagtggcgggctcggaggttgttttcgttcatgtaggaactatcacttccccatttttttcataagaaaactgagtctcagtcctgatacacagccaggaagttgtgatgttcaggctccaacctgggtttacatggctccgaggctggggctcttttctagtcctcagacacactgtcgcacgcctgtggcagaagctcccatctcacacttgccgaccctcaactcacacagtcctgagacccacatacgctgagcgcctcacactcctataacacgcacatgccctgatgcacacacattttcaacacgcacttactctacccttcaggcatggtttcacactcactgcagacacgtcaccctcccacacgtctccaccctgggggtgtgcagtagcatgctctctcccacctcagaacctcccttcagtcccctcagacacatgccctctctccacgcagagacaatcaaagctgaactaacaccttccagggtgaaaagcaaatgcccagtaaggtacgtcttgggtgcctccgtgtcccctgagtttggtcctatcaaaccagcgatgatgaggcagcttttctttcgttccttcctccatcatcaaacaagtgctcctgcatctcctctgggccgggcctacgtcagcaaggtctgagggaagcggccaaggagagtgatgacggcagcccaggttgatcagagaaaggaggcaggtccatgcgcagtaactcagggaaaacatgatgaggacctaaggatgagaaagaagcctccagagttccctgtgcagagagattccatcaatttcagagggtcaggggagtgccatgcattcatccaacaaatatttattgatagtgccaggtgctggggtatattggtgaataaaacatcttcatggaatttgcagtctattgagggagatgattataaatagctagagaaatgcatgtacagcagatactgtggagcaaacaggttgcagacaataataggggaaacctactttatagtaaggtagtagccaggaagagcctctctgaggaggcagcatttaaggcaagccctgaaggttgagttgagccagccttatgaagagcaagggcaaaagccttccaggaaaagggaatagtgtgtgcaaaggccctggggtagggaagactttagtattgtcacagagcttttaaaaagctgagtggctgcagcatagtgtgtggggtgtttgtggcaggaattaggttggcaggagggggttcttcatcctataagcagtggaaggtcattaatattcttttttatttgtttttttttttttttttttttttttttttgaggcagagtctcactttgtcacccaggctggagtgcagtgaggtgatcttggctcactgcaacctccacctcccgggttcaagcaattatcctggcttcctcagcctcccaagtagctgggattacaggtgtgcaccaccatgcccagctactaatttttgtattattagtagagacagaattccaccatgttggccaggctggtcttgaactcttgacctcaggtgatccgcccgcctcagcctcccaaagtgctgggattacaggggtgagtcaccgcatccggccggagatcattaatattctaaacagtgggggagaggacacagtttgcgatttagatagattaagccagccactgtgtggagcatggactgtagggagacagcaggtagacgtattcaggaagctgatgcagtagtccaggtgagagtttgtggtgggcaggaagcaggatagagggggagggaggcaaggactcttttagagagagacataagaggacttgccaaggggctgaatgtgaatccaggtgattcctgggtgagaaactgggtaaagggaggtgccccttattataatgggaaagacctagagaaaatggatcttggggtgaaaacaagagtttggaggaggtggggattctggacaggtttgaataagcagaaaggagtggggtggacattccagagagggatagcttacatgaagtggccacggtggcatgtctggggactggaggggccctggagcctccctctgcaggtagggagactcctaggagctatgtggaccaacactgttcccttaggagcttctcatcctccctccaggtatgaggcccggttccagcagaagcttctcgaatacacagactccaacaacattgcttccctcttcctcacagctgccaacagatggctggaagtccgaatggcaagtgctattcccctctaccctggcctctgataggagggtggggccagagcaagagcacacaggtacctggggatgaaagagaggataggataccagatcgtgtggacaccaagccttcctgcttcccccagccctggtggtcctcctagtgtctagcctgtgctccttttccccatatcactgcctggaggcttgtgtatctgaggtgtgtgccagtggcaagaacagttgtggtgaatgtgtatctgcagtgggtcatatgacacccacattgtgtgtgtttgtgggccagctgaggcgtgcatgttaaagggtgtgcaggggctagggggtaggggagcatgagcttgtgggacatgttggctcctggggctccagccttcgcagcccttgtgtgtgtctggtgacgtgtgcatgagttgcagggctggagtggaggcctggctgagctgctctctgccccgaaaaggagtgaggtagaacaggggcctgtggctctaacccctgagcgcccaggtcagctcctctccctccccaggagtacatcggtgcatgtgtggtgctcatcgcagcggtgacctccatctccaactccctgcacagggagctctctgctggcctggtgggcctgggccttacctacgccctaatggtgagcggcagtgggctagggcagaggaggggtcagacaccagcactcccggagcaccttcgtcactggagacatgagacactcccaggccttaccccaatttcatttgcatctgatgccagagggacagtgcgggcaggaaggctgaccagcaggccccagggcccaggccccagacaggtggaggttggggagccacatgactgaccctccctgtgcctccagggagggctgctctgagcaggcagtggatggcagcaaaaggaatctggggccctggcccctctccagccttaagaagagccattctggtggctgaggacagaactaagcgaccatggagtgtgcgccactggcttgctccccacaggtctccaactacctcaactggatggtgaggaacctggcagacatggagctccagctgggggctgtgaagcgcatccatgggctcctgaaaaccgaggcagagagctacgaggggctcctgggtgagaggctcagggagaggggtggggaagagtccaaggaggagtgtgtctgggttgggggccacaagggagcctggggatggggtggcactttcggatactagctgtggcccatgcctggtggctgagcccagcccggcccccagcaccatcgctgatcccaaagaactggccagaccaagggaagatccagatccagaacctgagcgtgcgctacgacagctccctgaagccggtgctgaagcacgtcaatgccctcatcgcccctggacagaaggtcagagcacgggcccaacccaatgctgcaggacaggcgtgagcaggggatggggcatgcacggagctggatggcttcgcagtcacctcgtggccctccagggcc

SEQ ID NO: 15308 - DNA, 48770 bp, Homo sapiens
tcatcaccttccccatcctcttcattggtgagtgcgcgcagcgagccgcggaggaggggacgggagagcagggagggaggaggaggcgctgcgcgccgcaccgctcggcgtccccttccggcccgcgaccgccgtccgcctcgttcccggggtcccctgccctgtgtcctgcccgccggtccccgcactcgcacaccagctcatcccttcactcccccggtgcccccgatcccgcgccaaacacagcggacgtttgtgacccatgggatcaccaagttttgcttctgcagggccaagagctgggatggggaaaagggaaagaggaggtctcagcacgcagtgggaaactggagaggggtcgggcctcaccctccgtggcgcagcttagggagccgggtcacccctcccgcaaggcagcctccctgtcagccgcagctgggcctagggaagagggaagcctgtgctttggagtctgggatggaggcccagctaacccctatgctttcaccgggctgagccgcgcagtggtccgtgatctctgacagtcccaggcccgcgccctgggcgaggagaggcgagagctagggacttggattcccttcccccgccaccccacccgggcatgtgtctccagagcgcaacttctcaggctctgcgcaaagtagctccgactcgccgacgcagcgaccccggcgcccttgcttgcaaagttgggcgccacggccgggacaatcgtgcgtgcctctccactgaggtcccccccatctctctccaagaccttgactcttccagaccagtcaagtctatcaactcatagggtgtcccctgcatccccaaaacgtgttcattcactttaagaaaacaagcaaatcttaaaattcatatacagctttggggaagaaaggaaagattgtcacaaaattagatttacaagaggttgctgcagaagcagagttgctagttattaacaaagacagttagatagaaatagaaataaaacatacaaaatatgtgctcatatgtgcatcaaaaatcaaaaaagaacagcatttacacttctgttctcagccaaacggtttattaacctgatgacttgtcacacaagaagttagtatgtataatggggtaccttggcagggcacagtggcttacatctgtaatctcagcattttggtgggctgtgacaggaagactgcttgagtccaggagttcgagaccagcctgggcaacatagtgagaccccccccgccctttctacaaaaaattaaaaattagctgagcatggtgatgtgcgcctgtagtcccagctactcaggaggctgaggcgggaggatcacttgagcctaggagatcaaggctgtagtgagccgtgatcgtggcactgcactccagcagaggcaacagagcaagaccctgtctcagtaaaaaggtgtggtgggggaggtaccagcataggaccaggctgaatgagttggacgtttagtttgtgtgtaccagccttggggatcctcatgtgtaggtgtcaccctcaccatggacccaatgcccaagcacctttctggggttcatgcaccctcttcctcctccaagtgggcaggcatcctgcctctgactgtctctccctgcaggatggggaagtcagagctccaaggtgcacatccaccacagcacatggcttcatttccctgggcacaacctgcggtggatcctgaccttcatgctgctcttcgtcctggtgtgtgagattgcagagggcatcctgtctgatgggtgagtgactgtctgaggactcaggaaagtgaatctgctccagggtacttcctgaaaggcccaaggagatcctagctcacctatattccacaagcccatgtcttttgttactacatccagcagctcagtgtcttctatgtgccaacctctctgagctgggcactggacgcaagtgagtcccaggccctgccatcagtccaggagagcagagggaacacggacctgcatgccaagtcccagtgaaataatgctagagcctattagaatgccacaactccagtgaaaaatgtctggcctcttctacaacctgccggagttaccttcttggaaaaaaaaaaaaatctaaccatgccacccactcttgcataagacctttccttggttctcagctgttttgaagatgtggtctcagatcctcagcccaccattcaaggtcttcacagtcagccccacctatctctggcctcattccccatgcccaccttccgtttgggcctcacagcacactcctcacacctctgctacagcacagatcacactgtatgttaaagtttatgtctatttgcaaaactgtcttcagagtcagaaaggcctaagagttagaatctgagtcttgttcatctttgtgttcacagtgcaaggcatgtgataaacataaacattattcagtccataaacatttattgggtccttaggagaatgaatgaaaccatgttacaaataagtactctgggaggtgagaggaaggcagaattgggcaagctccatggttgagagggctttggagcggagtctggaagggtgactaggcttcagacacacagaggaggaaggagagagagaactggtggtgcctgagggaagggaaaaggcaccaaagagaaaagcaggtagggctagggagcagcgcaggggctggagcattaaacacaggctggggagcgatggaggctgaggctgggaacccaggttggggcatctcaggaggactgtgaatcccagcctgcatgtttgggtcggatttggtcagcagtttggaacagaagagagatgtcatcagcataacacttttaggtgggaacctgaggtgttcagcgcaggctggaggcagggagaatctagaggtataatagaagcaggacttagcattgactgcagtagtctaggtgagcaataactgcagacagaaatggtgtgtcagcagtcagggacagaagaggagcgggagcagccatctcactaaggaagaatccagtaaccagcaaggatgagagactgccaggagagggagtggtggaggagagggatatttggcttgagtatctgaggtccagcgccccctgagctggaatcagattatacccagactgcactcctgcagtgctgcctggctcctgtagttggatggcaggggataggctccctcatcctccctcccgttccccaccttcccttccccaatgtccctgcatcctggcttcagcagtgatctctaaaatacctgcttgacttggaggcagcagctctgcctgcttattaaagtccctagaccagcaagaagaccagaaggcatactgctacacaagcacgtgacaagtccgcctccacccccacccctacaccccttccaaagtagcacaaatgccacagtgagccctcagatgggaaatactcaccagatggtgacagagaaagacacctccgcccttggagaaggaagacctgggtcttcagtgagcactgctgctgtgtaccagctatgggactttgcacaagtcattcaggctttctgggcctcataagcatttataaacatacgataaaacattttagttgccaacttaaaaatgtgtgagaaagtataaggtgtttcaaaattatttcaaggagtaaagaggcaagagttttgaagatccctgggcagggtgttggctgttcccagtgtggccattcatgactgctctctggccttatgaaacaagcatcatagtccctggcttgcctgcttcatggggctgtggagggtgaaattcgagcatggacagggtgcagagcccggagtggcagagcactgggtagactgtgtattcccagaatgtgggaaactggaatgaatcggtccagggatgccctcctgctggctgtcagcagcccctcctgtgtgtggctgtactgcttcagctcagtgcaaagggccatctcctccccagggcacagatcagctcaagctgagtaattgtcatctggtctttgtgagctcctacccccaggcctgagtgaggggcaggaaaagagcagacaggagaagtcacagacccttgtgatacctccagtctaatccagcctgggttttcagagctgtctggaaatttagggggcaggtgggagggggctgattaaggcagccctgatttgatttagagtgagcctcatttagtgactaattaagccatcttaaacctgtagggcttcccctcttcctttgggtattatttctttctgtgatgttctgaattcagaacaatcaaaacagtataagttagtgaagaagatattttttaataactacaatattttcccagaccaccatacactggataaagcctgtatataaaactttacctaatttcttaactaattgaatgtgtattatttaacaaagcagctaaaaactattctatgaagccatgtcatgaaatatttagttcaattatggttaatcctcatcttatttcgtcttataaaattttaacatttctacctcctattgcaaaaaaaagcatttatatcagcatataataaaacatgtctagatgtcagcttaaaaatgtgtgagagagtagagggtgtttcaaaattatttcaaggagtaaagaggcaagagttttgaagatccccaggaagggtgttggctgtgcccagtgttgccattcatgactgctctctggccttgtctgtcttgtaccttctatattagtttgaagaccttttttggagaatattcactaaagaatatcaatatctaccatttcattaaaaaagaaatgtggagtttgccttttcaagttggtttgatgcttattgatgttttcagggacccagcctcttcccatctttccataccatcctgtgtgtgtgtgtcagcctatcttccccatggtcacaaggtggctgcctagctccgggtattgcttagcatgagcagagagggcatgctgccgacatgcctctcctttatgacagagatcattctttctttgacatctcactggccagaatacgtggaccaacactggcaaaggagtatggaattgcatggctgcttaaaccaatcaccatccattccctggggctgggtatattgctgctggagcaaacctgtggtcctcctggcacagaataaggggaagatactctttggtggacagcccacattgcctctacacttgcacctcagtcccaccagacccactgaggtcacaggatagctctcctcatgtccttcctccttctctgttgaactcttatgtatccttcaaagtccagcctggtgccacctcctctgggaagctgtccttggttgcccaccccctcctttgtgctctctcagtctctgtccatcggcagtatcacttccctagcctgctgactccaacagttagctctgagcatggcagccccctccataccatcagcttctcaagggcagggacccttggcacactggatagaagtagcctggtgggcaacagcagcactgaggcagcaagctgtagcaggccatctgggaatggagtgggtaccacagggctggagcagaaagggcaggctgggcagatctgataaagtggctggaggccacatagcctgggcctttcgttccaggctgagcagagtgggttttgctgtctgcaggagggagctgtggaagggcatgatcacgaccaactaaggtgaccctcctcaccaggcccagggaagactgaggcctggaaggaggctctggctgcctctgggtcttacccccaggccacagtccacccacttagaggcctctgtgagttaaggtggagagactatgagctggtattgactgctccattccccatcccgagagaggagacaaaatcagtgaccttggaaatgcctcttcgtgcctcagtttcctcaccccataaaatgggagactaagagtacccactcgatggggtttaatgaagattaaatgggttaacatatatcgcatgcttagaacagtgcctggcacagagtaaatgctccataaatactgactctcatcagtttgttatcacagcctctggggagggcgccagtgctgacttatgctgttcgtgttaaatggggctgtcactgggtgagttgtggcatacaggcccctgcactgttcaagagaccccagcaacccttgtgcttagggctcagcacatagtaaggcctccagatcatatacccagctctactccatgtactggcagctctgcccagcccataccccaaatacgcccattaactaaagggccctgcagcctataaagtgatgctataaaggttcagtgttcagcctttgaaattcaaggcctgggctgctctattgcagtacttagcatgtccccatcctgtctgtttctctctcccatctcagggtgaccgaatcccaccatctgcacctgtacatgccagccgggatggcgttcatggctgctgtcacctccgtggtctactatcacaacatcgagacttccaacttccccaagctgctaattggtaggtgaggtgtaggagggaggggcagtaccttcattcatttcttcagataatgtttactgaggactcattatgtgccagctattgctctaaacagtagagatttggaatagaaaaagaaaaaaatccctgccttcatggagcttacagtctggtgaaggaggatagacaggcaaagacagtgaataaacaagcaaacaaataggtggtggggatgctatgaagaaaatcaagctgagtaaggggtaggggcaatgacaatgttgctatctacacaggatggtcagggaagggctgtggtaactgtgggcatgcagatatttgggggaaggtattccctgcaaggggagtgacaagtgcaaagtcctctgatagggatagatttggcaaagatgtcactgtgggcaaagccaaatgagcaaggggaagagtgggaggtgagggcaggcgtcaggagaggagcgagcaagagtcccaggctctgggcctgagagcctgggtgaactgtggcatcaataactgatgtgacagaggagggggaggtgggctgtggtggggataaagttttctactgggggcatatcgagtttgagatgtcacagagacagccaactcaagtgtcaagttgggctttcatggggaggtcaggacaggagctacactttcaggaggtgggccttgtagatgacatctaaagcttgagcctggggctggctgccgtggctcacacctgtaaccccagcactttgggaggccgaggtgggcggatcacccgaggtcaggagtttgagaccagcctgaccaacatggagaaacccccacctctactaaaaatagaaaaattagctgggcatggtggcacgcatcggtggtcccaggtactcaggaggctgaggcagtcaaatctcttgaacccaggaggtggagattgtagtgagctgagatcgcgccactgcagtccagcctgggtgacagagcaagactccatctagaaggaaggaaggaaggaaggaaggagggagggagggaagggagggagggaggagggagggagaagaaagcttgagcctggatgaggtcacctggggagagaagagaaaggctctgggaccagagcttgaggtttgctaacatttagagagactcgggaaggactgcccacttagagcttctgagatgttaaatactgcaggactggggtcccaggcagaagcaacaggatgatggttggtgtttactgagcatgtgccatggggcaggctccatgccatgttccttacattcattgtcccacaggctaattcccccagcctccttattggtattgttaatatccccattttccagtgtggaccctgaaactgagaggttaaaaataataacagtaaatactcactttgtacttactgtatgccaggccccatcctacctatgtgatatattaattcatttaatccttgcaacaactctatgaggtaggtaccattattattttccctttacatatcagaaaactgaggctcagaggttaaataactggcactagtctagctcgtcaaggggcacagccgggagtctagcatctgtgcaatctcctaatcatttctgagactgcgtgtctaagggccctcagacttcgtccttggggtaaaggtatcaatccgcaggtctgcctctgtgttggggttcagcctgtgtgtctaaggctggggctgtacatctggcagttagactttgttcacactatgtccttaagtcagactgatttttaggtatcacagcatcgaattgacatttggagtctggcacactctgtgctaagccagtgacatcatggtgttgtcagggagtacagggtgtttcttgcactagtcacaggtctgcctttctgtagaaggtgggatctgagctccattaggattatccaggtgatccccctacccctagcccaggggcccccacatgagtatgaatgggagctgggggaagcaggttgagaggggagatgttaaatacaggcttcagagagccaccctgcttccatttctgaagtagctccttgtctgtagagaacccttcattaaccagggcctggctgaccagtgtcctctggaaacaccctgtctggacatctgaggagttcattttctcattctccagcaaacacataatgttctctctttaaagcacaagttatcacccgtggatggatttgtccttttctaaggaacaaagactaactccctccattccccttgttggagttatctccccttgaaaggacactccacagagccagaaattctagaacagggaaaagtggaggggacgtgcctgtgaactgcagggacagaaggaaatgggtattgggagaatggccagccctccaaggggctgatgtctggcctgggtatggagtcccacagaaaggggacctgtgatgcagcttacattgtcccgtgagggaaccatgatcctggaacccagatgaggccaaggaaatgttctctgaaaaagtcatatttgagctgagaactgaaggaactaactgggagaagggaggaaagagtgcttcaggcagaggaaacagcatgtgcaaaggccccaaggcagaaggaacaaaacacattagaaaattcagaagaagaagagtggcgtgggtgcaaagtggaggggagctggactttgggttttgtttgcttgtgcccaggctggagtgcagtggcaccaccttgggtcactacaacctccgcttcctgggttcaagcggattcttgtgcctcagcctgctgagtagctgggaatacaggcgtgtaccaccacactcagataattttttgtatttttagaagagttgggatttcaccctgttgaccatgctggtcttgaactcctggccttaagtgatcaggtctcaacttcccaaagtgttgggattacagccgtgagccaccgcacccacctggaaggtcataccacagatgtttgcctttatcccaacagcaatgggaagttgtgtgtgtgtgtgtgtgtgtgtgtgtgtgtgtgtgtgtgtgtggtttaacatgtttaacataaaatttatcatcttaactgtttttaagtatagtgttctgtggcattaagtatattcacagccgggcatggtggctcatgcctgtaatcccagcaccttggcaggccaaggcaggtgaattgcttgagctcagaagttcgagaccagcctggccaacatgccaaaaccccgtctctacaaaaaacataaaaattagctgggcgtggtaatgtacacctgtagttccagctacttgggaggctgaggtgggagtatcatgggaggctgaggagagaggatcagttgagcctggaaagtggaggctacagtgagccaagattgtgccactgcactccagccaagattgtgccactgcactccagcctggacaacagagtgagaccctgtctcaaaaaaagaaaaaaaaagtatattcacagtgctgtgtagccatcaccactatccatctccagaactttttcatcttcccaggttgaaactctgtactcattaaatgataactccccatttctccctccttacagcccctgacgaccaccattctactttctatctatgaatttgagcactctaggtacctcatctaagcggcatcatgcactgtctttttttttttttttttttttgagatggagtcttgctctgttgcccaggttggagtgcagtggtgcaatctcggctcaccgcaacctctgcttctctggttcaagcgattctcctgcctcagcctcctgagtaactgggactataggtacctgccaccacgcctggctaatttttgtatttttagtagagacggggtttcaccatattggctaggctggtctcaaactcctgatcttgtgatctgcccacctcggcctcccaaagtgctcggattacaggcgagagccaccttgcctggcctatttgtctttttatgacttgcttatttcactgagcataatgtcctcaaggttcatccatgttgtagcatgtattgaaatttccttcctttttaaggctaatattctactgtatggatatgccacattttgtttatctattcgtctgtcagtgggttgcttccacctcttgactcttgtaaatagcactgctatgaacatgggtgcattgaggggttttcgacataatcataataattgctttatggagaccagcttggaggagaacaagatggggaggaagtgtggaaaccaatgagaaggctctcagggtatagcgggaatacagaggacgcatgatgatgcctggacttaggtggtaccacagggatggagagaagtagatagagtcaagctatttaggacgtgaaatagacagcatttgttaatgggagaggtgtggggcgagggagaagaatagagggagaaggaggagtaatgggagctcaccagcagcccccatgttatgcctctttccttccttttccctcttctctcatcaggcattcagcttttgctgagtacttctgtgtctgacaacaggctgagcactcagcactgcaggacaggactatgcaaaaaacctctgggcctagtcctgggtgcactgctaattccctgtgtgaccttgcacaagacatccaagctctctgagcctcggattccccacctgggcaggaagagtaagtccctgcctaagtcatagggttgtaatgaagagcaaagcagaccatatctgttaagtgttagggacaagacaagcatgaggcatattttcaagtctcggctcctgtaggcagctctcactaagggctaaagggcttctgatgcctgggatagaatctgtccggcagagtggagtggaggcagggggacagccttcagctgtggaattcctccagtcctagagaccagcctgagctgggggacattattccagtcctgaggcatgagagcagaaggccgatgcttctgccctccatcctaatgtcctcctgcagggacccaaggtggatggcatcgatccccccgggtgagctcagccctgggcgcatggtggggcccaacatctcaacctgtttcctaaccctgagccaggcaggacagatcccagatttgtgcccaagagatgctctggcatccatgcccaggcccacatagggatagagggcagggtgaaagtctctctccctcactcgggtcctctggagaggggctctgtgtcatgaagctgaccttatccgcatctggtctaggagggaggagggaaggagctgccagtgctaaaatctcccccaccctcaaagggggacttcacaggttattgctggttttggttgttggaagctgacagtgatttattggcagattgaagtgagtgtgtgtgcgagaatttaggatagaatctactgatagcttctgaggtttaccttccccaggtcttaaatctggagataataaaaatataacagctaatgtccaaagagcacccgctgcgtgtgaggctcactgcactaaatgctttccatatgtttctcacaagaaccttctaggtagcactattatgattcccacttaatggatgaggaaactaagctctagaaggctaagtgactaatccaaggtcacacagctattatgtcacaggctctgagcccaggtgtatctggctgcggagccaccaccactaacccctgtataacgctgcctcacagaactgtggctggctctttccgtatcccccatgcccctgctccatcatcatgctgtggtgggctctgaactgtgaggacagggatccaggctttcaccctctctctgtccctagctgccagtgcacttgggcaaggtcacatcctatttctgggcctcagtttcctcatctgtaaaatgaaaggctggattgaatgacctttaagatttccctcacttggaaattccacaagtaagtcattatagcatggagcttgcatgcatgggctccagcgtcaggccagcccagctctgccagttaatgggtgtgtggccttggatctgttacctaacctttctgagcctcatttcctttgtctgagaaattgggggtgacggcagtgtactttctttgaaaagttatggtgaggaatagataagatcatgtgtttaaagtgcttacttggcacagtgcctgtaacttagttaaattcaataaataaatttcccattcttcccatgatcatttatttttaagggacatttgtctgaccagtttgatttatgagattattggtgtttttcatgaatgttaagacgtacgtgcgtcatcttagagtcatgtactctgatatattcacacgtgcacatccacttactcggaaatgtacacacccaggcacgcttattctgtctccttctctgccacatacttgcacacattatgtgagtgtacacacatgatgcacacacgtctctgcgatcttccatctctcctcggcagccctgctggtgtattggaccctggccttcatcaccaagaccatcaagtttgtcaagttcttggaccacgccatcggcttctcgcagctacgcttctgcctcacagggctgctggtgatcctctatgggatgctgctcctcgtggaggtcaatgtcatcagggtgagggtaagcaggccacctgggccagggtggggtgggaagcagaggctctggcctctgtcctgccctgggttcaggcccccaccctgcttctcagccaaactgagaagggatcagcttgttttacccgcccgtgtaaaggggagtggggccgtggcggaaatttcaggatagacactgcatctggcccacgtgtgctctaccccagggtcccagagggagaggggggtgatgggtgtgttcgctgaggttggcggatgactttccgtagaaagggaagataagcatcaggcactggcctctcctactttctttcttcgggggtgggggactttgctttaatgtattcatatcgtcacgctggtaaatgaatgagtaagtgttttgttttcctttctgtttgctcccgcctccctctctcttcctcaccccagactccaaccttccccttcccctgcccctacctccccaggcagcccagactaatgaactcgtttgtctttcccatgctttgtttttattagtataataccatatgtgtctgtctaaataaatacctattcaggttttttcctctcaacacaagtgaatatgtaggtttcccccacggtatttatcttgtaagaatgggatcatattatgcagttttctgcactgtgcttttctcacccaacaaatatctcttgggactccctccaagccatctgatatggctaattccgttttcttaatggctgcataatattccatcgtatggatgagccataatgtgttcagctatttctctatggatgggcatttactttgttgccaagttcttgccttcatgaataatggtgtgttgaacatacttatatatttatgtattgctgcttttatttctatgggagagagtccaaggaatggcgttgctgggtcaaagggtctgtgtattttaaattttgatcagtgttacatattgccttccagaaagactgtaatctgccagcaatgagtgagaaaaccctttccctgccttccaaccagcagtgagggctacagccctttcgaacttggactgcctgcatttctctgactcttctgcttttagttggtgatctgcagggcacaaagctccttatgtgtccccccatccagtgaccctcacaggaaccctgtgatgcaagcaccatcccctttatagatgaggaaacattttagatgaggcttgtccaaaaacaccttgctagtaagtggaggaggcaggattcaaaaccaggtctgcatgacttggagttctgtgaactgtatatgaaacatggtggtatccttagatctgtggagaagatagcatatgagagattcctgctcctccccaacccaacctaaacccaacccagcctagccatggggggttcaaagtcgacctcaatgagcagttacaaagtcaggatgccctgacattggtggccaagaagtgttggggaatccttttcctggtaataattacaggcgaaagatggccccatctgttagagatcaagtgtggaatatcacaaccccagatccttgctggggcaaggtagggagtggtgagaagttggacttacccatcccccatggcccatgtgccccacagagatacatcttcttcaagacaccgagggaggtgaagcctcccgaggacctgcaagacctgggggtacgcttcctgcagcccttcgtgaatctgctgtccaaaggcacctactggtggatgaacgccttcatcaagactgcccacaagaagcccatcgacttgcgagccatcgggaagctgcccatcgccatgagggccctcaccaactaccaacggctctgcgaggcctttgacgcccaggtggtcagtgggggcacagccacaccatctattcactgccttctggtttagggtcacagagagggacctcaaagggcattaggtcaaaatcctggtgggacaagaggggaaactgaggctggtgaggggaagaagcttgccttaagtcacacagtgaaccagggacaggtgcagggctgaggattcataggacaggcacagttggaatggcccttaccgtttaggtcgtctagtccaaagtccttatccagatggggaaactgaggctctgagaagggaagtgaccccactggactctcacatccctgtgctctttcctctgcagcttactgactataaaggttggagtgttcacttgatttggagcaggggtgttagtggcctgatccttatggtaactctatgagttgagccagacaggaatctccccatatcactgaggagcaaattgaggccctgagaaaggctgtgacctgcccagagctggccacagctggcaggcggcagaggcagtctcctggctcccagtccagtgctccttcacttcctctgccctcgcaccagggcagttgctgaggcagacacggtggcaggtggtaatgagtgagtgtggcacatggccacctcctcattccagtgctgtgctcatcacatagtccctgaccagctgtgtgaccttgagcaatcatctggccttagtttccccatctagaccatgttggtgttgatagggccctcccaactgtgcacttgctgattccatgatctcttcctggagttcacctatttgcagaggatgtgaccactgggtttccccagacaacaggagctaggggcatcctgggaggctaggcccagccgtgaattagccctcaggcactctgacctggccatggtctctctgggcagcggaaggacattcagggcactcaaggtgcccgggccatctggcaggcactcagccatgccttcgggaggcgcctggtcctcagcagcactttccgcatcttggccgacctgctgggcttcgccgggccactgtgcatctttgggatcgtggaccaccttgggaaggagaacgacgtcttccagcccaaggtaggcagccccaggggtagggtaaggcaccctctagatggttttcagttgtttctgagagtgcaacaggccaatgtgtgtgagccatggccacactggagtggctcctcacacatgcgcaaagcccatagcagtatccccaccacagaatactctacatctggtcaacagaaatgccagagggcgagcctatgccccaagggtatcctactctcctctcaccgtcactaccatagtacctctcccggtagttaggtcagtccgaaaactgcaggaagtgcttttgtttgtccagtgtctagagcttctgtgacttggatttgttggctttcagttcatgtcatcttagtaaactctttaaaagttttcaagatctgtcttcttcagtcctgtaaaggctggcacttgagctttctgcaggggcatcttgggagctactgtcagaggagagagaagtgggaaaccctcacgagtggagctttgtctctccccactccaaatttcattcaaagctgcccgtagttttattaatatgttggacttttccattaaaatttcttttttaagaaaagtttccatggcttaaaaaacactggagacttattagactagattatatccaatggccttggcagttgtaacgattctgcaaactgaaatttgttggagctagaaaacctttccccggggttatttgccctgcgtggggccgtagcatccacttcgggggctgggcagactgtgctctgttgtctgtttccttgcagccgtttaggtttaaatggccacaaaatgaaaactttttcacccctaataagtttcagagttttagtttccaagtgaggatgtcattataacattttaaccacagacagtctgaaaataatgcagagaatggggaattagggtttttaataatttatgacaccctttgcgtaacatttgttcatctcatgagctccaaaatcgcagccagcagttaatcctcaggaggtttatgttcatttttctggagacataattagtcagctgaacagttttggccacagatatgagatacgttgagtctgatttatgcagcaaactttcattgaacactgctgtgtgccaggcctgggttgggctgtgggaatatgaaagcaatagttatgatgaggatgattaacaatattaacagccacttactgaccacataatacatacctggctgtgtgcaggagttatccatgtgttatttaatccctaaaactatcctttggcgtgagtatattttgcaacatctttactgtggtatacctcaaatactgtacagtttatgagatgataggtattcttatccccattttacagatgagaaagttgaggctcagaaagtttaagtaattttccccagggtctctcagctagttaataacagaggcagaatttgaacacaagactcactccacagtctgggcatttacagccaggaagctaaattgactattattatcaagccatcacctctggctccaaggattatgaaatccaacagtgaggagagaaatcaaaataaaatacttttatgctatgtgttacatgtgactcttaggaggaatattcagggaattgtgggaaaagatagtgattaacttagccagtggtcatgaacagcttcatagaggaggggatgtttgaaaggggtcttgacggatgagtaggaatttgccaggctgccatgggaagatttcttgctcaaccaagaatgcaaggaccacttttgcttatttaaactttgatggcttttgaagccatatctggctttttgagcctctctactttacctggcccataaaagagaggggaagcggctgcttctcttgtctacaggagtgtcacctttggctctagcctgaccataggctaccccagaatacccccattggcgatcctgaagcagcatggagccagttgttaatatcagggggaaatggcacaggccagagcccttatcagagtgtccacaccacgctcttcttcctgtgtttcccaaaacccttgtgggattctgctaaggagagagctctgaggcaggacgtgccaaagagatggcgaaagcacttagaattttagttcatctgaacgttatcattgccgtttttttctctttgtttatacacaaaccctggggtttattaccgtctcattggaatgctcttgtcccagttacttagcacacaaatccctgagacagatggccctgcctcagtggcagtgggccttatcagatttaatattttttccctgcagcccaaacacaatcagaaaatttccgacacagaaacaagagttgaaagtaaatatagtctccagtgtccgcaacaaagaactctccatcatgtggttgcctgggatgtggcttaattctcatgtgggcttctgagctcagaaaatgggggaaagggatcatttactgagatcatttggttcatctcccagcccccaagccattctaatccagagagaaccgagtgctattctggtctttatgaatgacaaagaaggaagctccctagctacatgttgcagtgtttcacagtctgggagaggaagccgttttttctgcccagcctgaatccatcctgcagcagttggcacagcgaggcacctgtggtttattcatcatcactcttccttcctaagatactcagagttggcaagaaacatgtcatccttggtatccgcaaggacgaacatttctgatgtcctctttagttactgaaagtgtctgtgacttgccagatctttgatgctcctgtcaccccgctgccactccccagggaaagctgggacccaggttgggctctgcctatgatctatagctctttccagcctcctctccaacccaacccctactcccaatctgtcacctcccatggatgccactgatctggctgaaggacaagagaattagattcataatgagctgctggtgtctgaaacctgccagcactgccctgggctatcagttgagccaaaggaagaaggaacagtctgggtttgatcgaagggctaaagcttcaaacagcctctaagtctcagtaggaaaatgtgtaggtttgggagggtgtatgtgtttccgaatgagttcccctaagaactgcttatggttctatatgtgtgttctgtttgtccctgtgtcttttggtgtgtctttttctgcgtgtgtgtgtgcatgtgtgtgtgtctatgcccccgtttggattgccatatttgtggctatcattatgagtgacttaatgagtgtatatgcattggtgtttctgtgactttgtggttttgatgcatgggctggcctcttcataaccatgtccatgcagctggtctggcctagagtacctgccttcaattcactagctccttcttggccatcaagactctgctcaaatgtcacctgctccagggagccttcacctggttgaattagatgccccttatctgtgctcacataacatcctatcaaagcgccctgtttctttccctgacttgatcctctgtcccctattgcctgacctctgtgtgcccagcactcagcccactgcctgacacccaggagatgcacgggaaatggttctgcaaagaaggaataatgcagcaattactatatattgagtgcttacacttactgttttttcacatgcactgttacattgacttctcataacaactctctgaagtcccttcatagcctcaccttacagatgaggaaactgaagctaagagaggttgaggaacttacctaaggacacagtggctaatatatgatgagtcaggacctctaagtccaggctcttaaccaccgtgtcaaacagtcttgtatgaatgggtaggtgtgttggtctctgggtggccaaagataattttattctttacccagggcctcccggggctgggacctacggacaactcaccttttgacacctgccaaaataggaaacaagagtccaagtgatcccctctcctttaagcaccagagaacatgtgaaggggacctttccaatcatacctctggcctggcagagacaatggggctccaaactgtagagtcgggagtgctgggttttagtcctacctctgcagctaactcatttattctcctcagcagtcacattctgcaagcctcaaatgcaaaatgtgtaataacttctgtagaaagtacatgggggcatgaagatcattggcttgattgcttttaaaaaatcggtattgagcactactggggaaatccctggaaacaaacacaattcttccctgagagcttgtgaaaatgcaagactagggcctatgattttccaaagcattttcttccaccaagtgtcaggttgtaggtccttggtcttttctctcttgccttggtacctgcagggtgctgaccagtgctatcatatcccctccccgtttcctaggaccctcttctcggtagactccaacagggcctgccttccttgggcagcatggcaggcctcttggctagtctagtacccacttcttttttttttttttttttttttggatggagcctcactctgtctcccaggctggagtgcactggcgcaatcttagctcactgcaacctctgcctcctgggttcaagcaattctcctggcccagcctcccaagtagctgggattacaggcatgcatcaccatgtccagctatttttttgtatttttagtagaaacagggtttcagcatgttggccaggctggtctcaaactcccgacctcaggtgatctgcctacttcagcctcccaaaatgctggaattacaggcatgacccaccacgcctagtcaggtacccacttcttaactgaaacttagctattccaggttctatcccttttaaaccaactctttgaagagaggtctaataatgacccaatgacttatagctgcagtgagatttttattttaacaggtcacaaaattctcaatccacaaaagtagatttctgaccctaggttattttgttgggggcggagagaggaagtcaaaggttttgcagcctttagagctgcaaaaccagaatttgttgttttgttaaaaatgcacaaataccgacgagtatatttaagtaacacccatagtctaacgaacaaacatgatcagttggcttttccagccctcattctccagcctgtgtgttttctgctcattgtaacacagcgtgtgtgtggcattccatgtttctccagagctttcatgagaatcagtggtcttggatgcatagtgttcccatgagtaccttaattacctaaccattccctgtggttggaaatttatatgggtttttgcattctccttctgctctgaccccaaaataaatgtctgtgttcatacagctattaccttatgtgaaattattttctttgggataaattctcatgatgtgttgttgctttaaaatagtggactccagtctccagagctgcgtctctgcagaggacagtgggacagaagaatcccagggcatgttaaaaaggaccgggtcttcctaaacccacatgcctatatttctgacccagtaccagccaggggggcaagtttccatcccccacaagtcacaaacctgtaactgacactaggatgcttaaggtcaaaggcctggacgaggcctagacagtgggtctggggtagtgtttttgacatcactcaggttcatgttcacatgttgtccccttaccagcatgtgaccttgggccagccactaaccctactgaaactcctttttttcatgtatgaaatggggctaataatggtaccctcctcattagggtattgtgaggatagagttttgcacctgataaatattgtctcctgccccttcctcccctggaaattcaggtctctccctgcagcctaattttaaggcccatttttctgcttccagcccacccctgcccttctaccttcgacctcctccctctgcctctccctctggtgcactggcaaatgggacagagagcctcggtagggccttcctcttagagtcttgcacgcatccctcagtggtctccctgtggctgcttcctgctgccaccaacagatacagacccctgtcgcacagatcatggtagagacagtggtgagcaggaccagacagctccagggagcagtgagggctggcttagagaacctctgttaaactgagaggccaccatcaggaagctctgatccaagatccaggaatccctgactctagggaaaggcctccaatgagagcctgggccctctctgcctgattctgattgtggatgtgccctcaaactccttctcatcactttgttccatccctctttaccctgcagcagctcccacaccctgccaaacaggatgcacagtccagggcagtgtctgagaaagagcagagatctgtcttcatggaaatattgatgtggctctgctggggagcaatggatttatcaagatcaaagttttcctgggagttattgatgcttaatttggaaatagacacactgttgatccctggtatctttagcaacaaagttaaaatgtttgtttttcttcactggttgccatctgagatcttgccggaagtacacaagagaaccttaaatttaacaggaggccctgggagcccatgaggctggcgggcttgggtctgaaatcttttcagtctcttgtaagtgatgagctctcattctctcctgagagctctacggtgccatgttttccactggccttttctgctcagtaattgctacattacaggctgttggtaagttcggaacaagggagctgctgattccatttctgtagcagagaacatgcaccgtgagacttgttgtaccagttcaggttttaggtgctctatttattcttgccccattcagaatgctctcccctgggtctgtggccacaatgctaagagtcatatttatgggcctgcagttgtaattgggccccattctgttcccccaagtggaaagatgaacagggtgtaagcaaccttccctgtagttagaaaaacgtttagttggatttatcagtctgatttttcactcataaacaattgcacaagcctttgcaagcccagagggtcttgtaataatgatggccgtggtccattatggcacagtgatgtgttctacggtggtcattttgctggcaatgacagtcacctctgaacttctctttccaacagacacaatttctcggggtttactttgtctcatcccaagagttccttgccaatgcctacgtcttagctgtgcttctgttccttgccctcctactgcaaaggacatttctgcaagcatcctactatgtggccattgaaactggaattaacttgagaggagcaatacaggtacttggatgattattttttcactttgccataagaaccattattaggaataatgtccatgagtgttattcatcctcatggacactcaagaataattctgctgtaaatttattttttgttgcccattaacgatgttttaaaacagtaaccattgacaaggcagtgtgggatagtggaaaatatcttgggctgaacttgggagacagtgtagctctggctctggttctgccttggactgggtctgaaaatccagctgctcagcccttggcttgaaagtggtagacgtcactaattgatcacagcactctttctgaccaagggtaaatgcaaccttggaatcctctctaagtggctgttccagagttctgctaccagacagtcttctttgggtgtgaaaaaaggaatgtgcttgacatacaaggtctagatagcctctaagacagggtcccctctaagatggggtattggtccatggcctgttaggaactgagccacacatcaggaggtaagcagtgggagcaagcattactacctgagctctgcctcctgtcagatcagcggctacattagactctcataggagtgcgaaccctattgtgaactgtgcaggcaagggtctaggttgtgtgttccttatgagaatctaatgcctgatgatctgaagtggaacagtttcatcctgaaaccatccctctcccccaggtccatggaaaaattgtcttccacgaaaccagtccctggtgccaaaaaggttgaggaccactgctctaagttctatttgaacccttaagtcttgctcactaatgagagtgacctatttggtctgttgggtcacttaagtctaggctcttggtcctgccttctgtgatttccttcttagagtttctggaaagatgatcaaagccagggagtgttcagggcccctctgaagaaggtgatgatgagagttgtccaagtcccagggtcttcactaggattttggttcagctatcagactagagagacatcctgattgagagtagtttaaatgggatagaagtttgtttattcttcagatagagtcagggctgacacaggagctactcaatgatcagagacctggcttcttctgtcatgttgctctgccagccttcttttgtgacttttgtctccatagccatggtgggtattgaaactgccactatatttacatttaaactagccagaagaagggacaagaggagggaacgcattttccttttaaaatggtaatacctgatttgcacataccctctcgcatcccattggtgagaaagtggccaaatggccgtatctagagagtctagaaagagcttggtctttattcttgacagctatatatgcactgctagaaattctctgtgcaaagaggagaatgggcattgggaataactagatgcagctatgcctagtgatgtccatgaagttgtggtaaaatcctgaagctaccttgttctttggaaatgttcctcagaatcattaacattagtcatgtgggagacaggagaagaagctctgcagaaaagggaccgagaggacaaggatatagcttgggctggggacaatgtcagagtccaaactctggctatcttggaatagtctgtgtgaacggtgccctcccaagttgtgcagtgcacaacctgtgcagctatatatggcaaccctgcccatccccagtggtttctcactgggaaagcagagtatttcctcagggatgtcattatgtgacaatagtggaaaaagcccaggaaaatctaagaccttctaagactcatgggggcccagagctgggaggaaccaagctgttgctcagttcagaaaacttctctagaaatcccagcctctcctcacacccctccagtgacaggcagacttgcaccaccacaagcaacagccacttttgtggttgggcagttttgtaattaaatatactaatgtgtgtatgtcataaattacattttccaattatgccaaaagagccaaaaatggttttttaatggttagcatataatcgtttttatcaaattgcttgaatctttcatgttaataagagagattcattactatgccacaaaaagcaaatactggcattaattatagaaacaaattaggggggtggagcgcaatggctcatgactgtaatcccagcgctttgggaggctgaggcgggtggatcacaaggtcagaagtttgagaccagcctgaccaacatagtgaaaccccatctctactaaaaatacaaaaattagccaggcatgttggcgtgcacctgtagtcccagctactcaggaggctgaggcaggagaatcgcttgaacccagcaggtggaggttgcagtgagctgagatcgtgccactatactccagcttgggcgacagagtgagacttcatctcaaaaaaaaaaaaaaaaaaaaagtggctcatgcctgtaatcccagcactttgggaggccaaggcgggtggatcacaaggtcaggagatcgagaccatcctggctaacatggtgaaaccccgtctctactaaaaatacaaaaaaaaattagccaggcatggtggcgggtgcctgtagtcccagctactcgggaggctgaggcaggagaatggcgtgaacccaggaggaggagcttgcagtgagccgagatggcaccaccgcactccagcctgggcgacacagcaagactctgaaaaaaaaaaaaaggaaagaaagaaggaaaggaaaggaaagaaaggaaaggaaaggaaggaaagaaagaaagaaaggaaagagagagagagaaagaaagaaagaaagaaagaaagaaagaaagaaagaaagaaagaaagaaagaaagaaagaaagagaaagaaagaaagaaaaagaaaagaaaggagttagggagaaaaaaaccctttctttctttcttttggagatttccggaaaatgtacccttacggatgagagcctgtgtcttcatgggttagagaataaccacgctttgtgcataaaaagttattaagcacaattcctgaattatacataattactagctgtcagtcagttgtgcatttctgtgtatgctggtcttcacttaataagactttatttcacagatcacttggtgtccctacttcactgaaactaggtgattatcttttgaagtctcatttcacataacctaggaggtatatagatttctttaaaaatgtcattgccattattttaaaccttacccatggtatatataaacttacagaaagacagaataggttcattattttaaaccttgcccatggtgtatattagctcacagaaagacatagaataggttcctgccttaagaaaacctgacccacaaaaaagcctgggtttacacaaaagaggaattaagggcggggagcccaccttacaacagaatgaataatagaattttatccaagagcaggcatcctgaggacatttaagacccggatgcatttttccttgttcaagagcacacatccaaaaattgcagtctttctgcgagtcatgatcactctgcacataaagcgtttaggttcagagctcggggaggccattaccatggctgctctctgtctgccctgtgagggtccttggggtggctgcactctggggatggtgctggggctgactgactcacgcggtcgtgtaacacatcagaccttccaaagtcgaacccttgttttgtttcaaggctcaattatgacaggacttggtctcagagcagatcccctccctaggctggagaaggccactttaaaacagatggcctgccccacttcatcatttttatggctctgatctgtgttctccactggcctctggtaaatcaagaatacaagtggacatgaagatctgctttaaaaaataaagaacagaccgggtgcggtggctcatgcctgtaatctcagcatttggaggccgaggtggatggatctcctgaggtcaggagtttgagaccagcctggccaacatggcaaaaccccatctctgctaaaaatataaaaattagctgggcatggtaggcacgtgcctataattccagctactccggaggctgaggcatgagaattgcttgaacccggaaggtggaggctgcagtgagctgagatcatgccacttcactccagcctgggaagcagagcgagactctgtctctaaataaataagtaaatgaattaaattaaataaaaataaagaaccaattaagtcctgtctacaggaaaaggccttacttgctggagaagtagcttgctgtgctggagtagactagtaagttggaacggtgatacagtaccaccttacagagctgctctagggcaccatggggactgtctgagaagcccctggcacactgtaacaggtggcatctggtgtggtgatgatgatgagaatgatgatgaatgtgaaacactctgctctcatttctagaccaagatttacaataaaattatgcacctgtccacctccaacctgtccatgggagaaatgactgctggacagatctgtaatctggttgccatcgacaccaatcagctcatgtggtttttcttcttgtgcccaaacctctgggctatgccagtacaggtactagatgggctgaggggaagggaggggggcagcaggacacacaaccagaatctgctggtccatggccagtaactaggagcacaccgtcttccactccatgcttgcctgtacctttcacacacttggctataccacaggctgtacctctgggtccctcctgtcccatactctgcaagcactgaccatctctcttaatgaccagagaaggcagtatcattaagactttaaaaatggagccaactttataaactatagaaaaatcaagccaggttcaggggctcacacctgtaatcccagcactttgggaggctgaggcaggaagattacatgagcacaggagttcaagactggcctgggcaacacagtgagaccccttctatgcagaaaaaaaaaagaagaaagaaaagaaaaatcgtacatggaatgcccacagatcttaaaagctatgttgtagcaaaatatttaattacatcaaaaagtgttagtgatgtatttttaagcaaaaagagtaagttacaaatagtatatgttgtatgcttactactaaactggaatatatgttatgtatacatttgtacagattcacacatgaaaaagaattggaaaatcacatagtgggattataagtgatttttattttctttatgtgtttctaaattctctaataagcgtgtataagatttggaaatcaacaacatgatacttttagcctaggcaacaaagtgagaccctgtctgtacaaaaaattagctggaagtggtggctcacaactatagccccagctactcagaggctgaggtgggaagattacctaaagtccaggaggcagaggttgcagtgagctacaatcacaccactgcactccagcctgggcgatagagtgacaccttgtctcaaaaacaaacaaaacctggtgttttttagccagatgtggtggtgcgcccctttagtcccagctacctgggagtctgagatggaaggattgcttgaccccaggagttcaaggctgcagtgagcaatgatcacgcccctgcacttcagcctggacaacagagagactcctgtctcttaaaaaataaaaataaaaacgttaaaacatggtatttttttaaagcaagacaacctttggtgctggctcaggaagaggtacattaccccccaataatcagaggagaatcgtcagcatgattgatctgacctcgggcttcatgtgtcccatctcccacccggagctcttccaccacagagtctgatcctgtcctatgcctgggactaaatcttcaccctggtgttcaggccagaaaccgaaatcccagacccattcccagagggcgggaaggttccaccgggagagcttgatgtagcagaaagtgacttgggtgagacaggctgattcaaatacttaacctctctgagccttggtttctttatctatgaaatggggaggctgcccaccctctggagttgctatggcaattcagttagataatgtaagtaacacagcaggcagagtggcccccagagtcttcacttcgtaaatatcagatccctctaccttgcacatgtttggtatgagtgaggtgttaccaatccagaatccattgcttcttgggataaagattccataaaccttcatctccagtgatttgtattggtcctccttacttgtaaagcttagagtttaaaaatattaaaagaaaaaaaggggagaggctcccacagggacacagctagacaagatgagatgcagggaatctgatgttcttttttatgggaacagtcatatatgccatcccccattaccacctacccatgcccagactgcccccgctccattctgccaagacagatcaatgactataaaagctacaaaagggcctggagatctcatctagtttagttaccaaccaaccttttatgcacaagactttctaagctgggtgtggtggctcatgcctgtagtctcagccactcaaaaggctgaggtaggaggatggcttgagcccaagagttcgagtccagcctgggcaacatagagagacctcatctctaacacaattttttttttgaaacatgaaaaatgaagatttctgaccatgcttctctcattagttaacactttgggctgtgagggtctgatgcagagagacacagcctgggaggatcctaacatgtacacagcattcaaaaggctacaagacactttctgttgtgtccccttgaacaagcagtttgtaagattttgttggccaggcatggtggctcgctcctgtaatcccagcactttgggaggctgaggctgatggttcacctgaggtcaggagttcgagaccagcctgaccaatatggtgaaaccccgtctctactaaaaatacaaaaattagccgggcatgatggcgtgtgcctgtagtctcagctactccggaggctgagacaggagaattgcttgagcccaggaggcggagactgtggtgagctgagatcgtgtcactgcgttccagcctgggtaacagagcgagactcggtctaaaaaaaaaaaaaaaaaagaaatcaggttttgtctactaaacctgctgcacggttaccgttactagtactcacagggtttgttgcacatgcatcgttgctaatagtgctaactaatattaacagcccttgccctatgcctggccctgtcccagcccccctcccttgtataatttaacccttgcactgggggtagagattttcatatctactgatttcttacctttgctcatttatcatggagtgtcctttggttttctgtgtttgtatatacctttaccacttatagatttgaccagcactcaagaaccagtgttactcctgggagttaatacaatcccagccccatggcaaagaaactcatgtggttaggattctgtgtgcagcctggttagccacagggcacgtaaggctttttataatattgacatgagtgcagaagccccattcccgtgtaagccctgagggctcttgtttcataatctttttttggtcacatgcacacagctttattgagatataacccactcatttaaagcatacaaatcagtgggttttagtgtcctatattcacagagctgtgcagccatcatcacaaatgtggaagttttcatttccccaaaaagaaacccgtacccattggcagtcactcctcatcttcgcccccagcccttggccaccgtttatctacacatacttttgaaaggctagtgaaactttctcagaaaaataaatgcttgctcaaacatttgggctataatttcaggggcttcatgggtgcccccctgacatttatcaagaacaccaggttaaggaatttagctataatggaggcctctgtgtttcccagtctcctgggtatcagaggcccagagagggcaggtgccttaccctgggccacgcagtgaaccagtggcagcaccatactcacacatctcctttctgcggttccccagtgacagagttctcaggaagctttttcatttattttctgagaggagggtaggccatcttgtattgatctccaactatatgccagccacaattctaggtgcttatcataaaggttcatttaatcttcacaatagtcctgcagagtggacagagtccttcagagtgggcattataatcaccattttaaagatggagaagctgaaaaccagagaggttaagtaactcacccaagactgcacagcaaaaggctggggctttgaaactcagggccacagactccaaagactatgtcctccccactatgctagatttttttcctaacctgtgaataggagacaaaatagtccttttatttctcacagttgctttgcacactcagaatccatgatttcttctgcatgagggccattcagacctgtgcagaagagagtaatggaccaaggagtcttgggagcacctaggaggaggggatgggggagcatgaggaggagccagggaacagcagcagctgcagcaccagctcccaccccagcctctgccagtctcttggaggtggtgtgggtgcagacaccggctcacaaggtgccctgttagtgagcttggggtgccatgggagccttcttgttgtcaggcccaacccaagctggctgaagaacaccctgatggcctccatttgagcacaactaatgaaggactggatgccagagataagtccaggagggtgatgctgcagggcaggccagggaagagggtacttcatctctatcatggtcctctgcccatccatgccagcatctaacacctgttaaacactgggaggcaggtggtgaaggggccacttcccagcctctaagatacctcctaagccaggaggcattctgtgattaaattacagggcctcccacttactcctttatccttgaggcggtgctggaagcttaatgccaatctggtgtagggctctgggactacaggaccaaggcaagcagtcctttctctctctctctctctttttagctaaggaagccagcacatctgttctttgagaaaaagccctgtatttagaggtgtctgcctttgaaggcaacctgagaaactgtcatcttggcgctttggggactggccatttacacttctcataaatattcagaagtaggcagtcatttacataaagctaaatgcagaaggaattctcttttcagggaatacctggcagattcattaaaaaaattaaagaaaccaagagcataagaatgaaaagcgaattctcggaccccaggctggttttttctggcatgggtgcagtaactttgcctctttgctcagttatcacttttttccaatgacagtaaccataagccctgagagccagcaaatagaacaaaaggtgctgtcacaaacattgtgcaatctcatctctgagatttccatctggaaaatagactggagagagttaaggcttcaaccagccttgcagataaatgcagttagttaccagcccagcaaccctctgcttgcatgagagcccattatgctaacctccttttgaaattgctttgtttctcctccttccctgcactccactccccaagataatttggaaacctgggcaccaaggcttgtcccactctaggggactggggaaacagggattttgccagcacctcctggcagggcaaccatcaggtcaaagggacctgacccatgaccccttcctcagatcattgtgggtgtgattctcctctactacatactcggagtcagtgccttaattggagcagctgtcatcattctactggctcctgtccagtacttcgtggccaccaagctgtctcaggcccagcggagcacactggtgagtgcccaaaggtgtgtgtgttttgtccctcttcccctccttccctcgacagcagcaggtctcctcccacacacccacactgtcattgactttgactttgactttgagtaggccacttcacctgtccaggcctcagcttctttgtctgggaaatggagtcaatgggggaggaggctgcctcccggtgaggacaggaggcgggcatggcagtgacagtattgacactcaggccttcctctcgggtgggagacggagcagaagcctctcccctctgactcggggacccctgcaggagtattccaatgagcggctgaagcagaccaacgagatgctccgcggcatcaagctgctgaagctgtacgcctgggagaacatcttccgcacgcgggtggagacgacccgcaggaaggagatgaccagcctcagggcctttgccatctatacctccatctccagtgagttcaccccacacagccagccctgggtgctgctgcgtacatgcaaggagagggtgtcagagctcgggtaagagggggtgcagggacagaagcaggaggccttgagattatccgactcagtaggggagcctcaaactggctctgatagctaagctcccagaaatcaaagtactcttcattcatttatccaacaaacatgcatggaaagcctgctatgtgctggacactgtgctggccctcaggatacagtgatgaggaagagagatgaagtttcattcctcatggaactgatatgttattgacagacagcagcaagtaagtaaatgaccacagttttgaactctcctaagaatgaagactttttagtaagtcagactgagctgtcattgccctggggaagctacaagaaagcttccatccacttggggctatgcaaaagaaaaagactagttatccttaaatatcagaagcccaggctgaaggtactcacaggtgtagggactgaatttatattaaccaagtagtttgggaaccccaagccaaggaagaagaaaaagaccaaaactggtaaaagtcctagagtcccatatacttgaaaccattttactgagaatgtaaaacttttttttctttttttgagatggagtctcgctctgtcacccaggctggagtgcagtggcaaaatctcggctcactgcaacctccacatcccaggttcaagtgattctcctgcctcagcctcccatgtagctgggactacaggcacacaccaccacacccgactaatttttgtatttttagtagagacagagtttcaccatattggccaggctagtcttgaactcctgacctcgtgatccacccgcctcagcctcccaaagtgctggaattacatgcatgagccactgtgcccagcccaaaagattttttagaaattgaaattttagttatggaaattaattcagtgaacaatggtcccctggtcagagtgagggcttacggaggtcaggtgatccatggagtcctggcccaagtttatctcacagttggtctcgtggctccgtggacccatcccatggtggttacttcccaagtgcataattgggatgtagatatttagcaaccagctgacttcacactagttccctgacctgtccagtctaagagtcattatggccaagtggaagcccctggaaagaagaaaacaaaaaagaaaccaaaacttactcagtgcacaggttacatgaatgagtatagctgaagagagaatttttgaattagaagacagatgagtggggattacacagaacgtggcaaggagagtaagttggtagaaccattttacagatgggaaattaaggccagaggggagtgtgttcctgagatccctcctgaggttagtagcatggctcggactagatcctccaaagtctcttaactcctggtctcaggctattttccacaaagagctgggggcctctgtggggtgaagaagacttaggacaccatggggcaccattatgaggccatttcctcctaggagaaaaaaaatctctgggctctgaaaggagtagaattagggtaggaaattaagagaggctaccgaccacctcctccaactaaaattggttcttttggtgccaggaagagacacacctggtgggggagggaaggtggtaatggagggggtgctggtagtgtctcccagatagacccatccaacaagtctcatggagaatgagacggtcactcaggtcatctgcgtattcttggcattcttgctgcctagagagagagtctgatggagctaggtggccaccaagctgtcccactccccaagacagtttggaaacatgggcaccaaggcatgtccctgtctaggggactggggaaatatcccatagcagtgttctcacagtatggggctggccatgaataccccaggagtccaacctccctttgtccagctagaccatggtgtcctatgcctcaggcagggaatgtggtccagtcatcagtggctgggccgtctgccatacatggtgcaagccatggcgttttatgcagaaagtcctgctagcatttgattttctcagaatggagctgtgagcatggcaggcaaccactgtttcctggattcttcaccaagacaccccaagttcctggtctctccccgttatcctcatccctgaccctgtggttctcagagcctccaaacacactcaggctaagcactccatagacaggggaaatttggaaggaacatctagggagctcagaaaagccaatgtccctagccccaggcccacttcaaccttctctctgtcagtcctgcctgcccctggaggctggttacatgaagagtaaccccctgcttgtgtatagccccccagttttgtacaggtttagagacagttcccagcagtaggaacagctgccgaggtgggagagggcttctcccgatagccgggggacttcctctcccaggaacaacagggtggggtagagcaggcttgtcgttgctgagatagagagagggaagggaaacaacaaggaaagtgggggcactgggtccccaaggttcctggcacagcaagcagtgaagttggggcagcctcaggtcatgtagtgggggcaggtgacatctgctttgactgctcctaagagatatgtactcatctcctggattccaaactgcagcctgggacatgttttcttatataaacagcatcaaaagatgtgtgagttcccaggctagcccactgaaccctacctagtgggtgctcattgtcccccagagcccccagaagacaagccgtggctttgtgatgggcctggggccaggaggacctagggatatgttgtgaagagctgagaagactctggaaaaaaggggctctggagccaagcaggagcccgcccaggactcctcacgtgtccaagtcacctagggagagaaacagagcagcccaggttggtccctggaagagagcagcggaggaggggaaaggggagagcccctggggagagctttgaaagtcaagtgctgtttgctcagtgtgtttgcctttccgaggatgtgtttttttttccctccgttagtcagcagtgggagggggagagagacgggtggtagggtgcagggtacctcctggctgcaggcatatgctttgagtgcgtgttcatttacctcctctggacttcctgccttctgttaccagggatcaagacacaggtcattaggcgtgaggtaatggggcatctcttgttctgacccctggcgccagtcttggagtcctgacgctgcagaggagccccagagtcacatttcctgttggggcccatcctgctcatatgcggcaccatcagacttctgggcaggcaagattacctgtgactctgtctgatggtctcgccatcaatatcactgagagtagctgtgtatggagtcccgaactggtacaggataaaacagggggctgaaaagggaatgaatgggcacagtttctctggcatcaaaagtcacatccagaattgatatttcctgttgagtaaaaatagaaatataagttgctcagtggatgttgagtgagccctattcatgtgccccactctgtgccaagcaccaggaaggagggaagggaaaaatgataagatgttctccccgttctccaggagtttatgctccactaagaagtcagagctaacatgcacagaacagtgtggcagcgagagcagaaccgtgtggccagctccatgcttgccgcctagcaagcgtgattgcacttcatcctcataacaacttggtgaggtgtgttgctctgttgtcccattttacagcagagaggactgactctcagtgaattgaaatgtctcagtgaggtcttccacagcaaaaggcgaagcacagagaaggaagtccatgtgggctgggagttcacccagagattcatgtaggggcaatgtgggctgtaccttgcaagatggtgggatttcaatgaggagaagacaaagtgggaggaagctggagacaaggactgtggtctcttcctttagaagtcagttcaatctttttttccttgtggaagcagcataactctaggtggttcctctgtatctgaggacaagctttgtagaggtgacaaaggggtcctaggtcctatcaggcaagcactcgatatgctgccagttcattctgtccattgtgagatacccattccagagcgcttcctctgtgccaggctctacggaggttctggatgttaaagaggaagcaggcatggccctggccctcccagtcttgtgggagattgatcatgcccatgaatagtgaccatgtggtcagagccacagggtcaattccaaatgcccctgtttctcttttgtgttactcacctgactctgggtctttcgtttcttccattcattttttttaaacaaatatttcctgcccaccttctgtgtgccaggcctggggatgcagtgggagaagcctctgtcctcctcagtggaggcgctaactcagaacaggcagtggagaaaaacaacatgacctggagacctggtgccccttccttccccagcatctttgaaattcttttggttgttgttgttttgagatggagtctcactctgttgtcaggctggagtgcagtggcgcgatctcaactcactgcaacctctgcctcccaggttcaagtaattctccctgcctcagcctcccaagtagctgggattacaggtgctctctaccatgcccagtaatattttttgtatttttagtagagacagggtttcgccatgttggccagcctggtctcaaactcctgacctcaggtgatccacctgccttggcctcccaaaatgctgggattacaagcatgagccactgtgcctggcctgaaattcttcaatatctacctgcccttctgccagttggtgcagccacagtgggctgcttatgcatatcctggcctggcttggtggggagcatggctgagggagagccggggcacccatcaattaaggaggtaaagatcagtctgactgagatgcctcctgccacacttcctcagctgccagcaactgacaccattaacctgatttccttccccctctgttgactgcactgactattggactgaatgggaaacagccccgtgcacctcaaaatgcacttcccctcctgcagatgcatcttgcaattaggcccaaactgtgagcctgcatgctcctcccctggccctgcacaggcaacaaagctgaagttaatcagaggtacaaatggctggctatgcctctctgacacgtaacttctggaacatgtatcaatgctttggaaatgaaaagctcctggtattgcaatgccaggctggtgcccataagggccagaaaacattccttgggcaaagccagggggagtgggtgatctgatcccagctcaggtttgttgatttgttgttttgtttgtttcgttttgtatggggcaagggttgagggtatgaaaaacttacactatcatttactaccgtagtccccagaacccagcacaccagcacaaggcctggaacagggataccttttttgaatgaataagtctttttttttttttttttttttttttttgagacagagtttcactcttgttgcccaggctggagtgcagtggcgcgatctcggctcactgcaacctccgcctcctgggttcaagcgattctcctgcctcagcctctcgagtagctaggattacaggtatgcgccaccacgcctggctaatattttggtatttttagtagagatggggtttcaccatgttggccaggctggtctcaaactcctgacctcaggtgatccacccaccttggcctcccagagtgctgggattacaggcgtgagccactgtgcccagccttgaatggataagtcttaagggatatttttggaaaggatattctaaaaaatacccatgtctctacactattgcagaagggctttcagttttgatggcagcctttcaggccagcctacacgcaactaaacttttccataacagcatcacacttacacaagaagaaggttttataatccacttgccattatttaacatagttcttcctccttaactttcaagatctgagcactataatgttcttctttttgtttttgtttttttctaaatcaaattaaggtgagtcacctcaccttgggcctgagttggacagaaatctattcttggctatattccccacccctccaccaccttggaaccttatagaactttatgtggttcaggaaaatgagggcgaggcctcagatcttcaacccatgacagctgtatgcccagctccctgccttcctgtcttacccccagctagggcacaggactgactattgtgcccagagaggtgccagagcctgtaacaaccccagacttcccaggtccagccacatccaccccagagccccaaaagatgatcttcagagagacctttaaaacacaagtagctggtcacttccatccagaccagaacccaagatggctgtgctcttgctgagacatgttggttgtcattgcctccgagcccactttagccctcagctctgtaccagaaatgctgttcctttgggaatcacagccaaagaagagatggagcagttctggaataagaacacaagttcaaactgtcccatatctccccacatcactatctacagttggtctcttcccatggcgatgtccatctgccaccgtggcactggtattgctttgagtgcaggggtctctctttttggcatgttggccctgttactccctgggaactttgagtcttatttggaatgcgtgaagtccctgtgtccggggccagcactgatccacacagctaagtttgcactcatcttccctctcatgtatcatatctggaatggggtctgacacttgatgtgggacctaggaaaaggcctgaagattccccagctataccaatctggagtggttgtcccggttcttactgtactgtcctctgtagggctggcagccatgtgaagaacagaggttcccagcatcatcttcctacacattattacattcacccatctttctgtttctcacttttatctccagcctgggaaaagttctccttatttgtttaaatccttttgtgcttttagatccccttggagcagtagagtaccttgtagaccataagagtggaaaagggtctagttttctccttgtttctaaagatggggtggctgaaaaaactccccttttttgcctacagcttgcctctctgggcctagaagtggttattctgtctccatattggcctttgatttgtgctgagggtcagcttttggctccttcttcctgagacagtggaaacaatgccagctgtgtggcttctgccctgggggctgggggtgaggctttgggtgccactgcctgtgggttgctggcttaaaggacaattctgttcattggtgagagcccaggccattaacacctacgcagtgttattgaaagaagagaggcgggggtggaggggaattagtctatcccagctagagggagataaagagggctagttagttcttggagcagctgctttgaggagaaaatgtatagcttttgacacaacaggaagatccagaaaattatcattgaacatattaaaggttatttctttttcttgcaaaacacacacacacacacacacacacacacacacacgcgaacacacgcagctgatgattctactctcccagccccagccctgaaggggacccagaactccctgcacaaaggctgtccttcaaggggagggtgaaagaagtggaaaatcacattttcattctttagcgtctccatacaacagccagaactgggcagaagctaattatatcagaagcatactccatgttgctgcatcagctttgggatgttcatttttaaatttatttatagcttgtctcattcctcaaaggagttcagggagctacaaaaataaagacaataaaattgaaaaaaattaaattaaaaaaaccatgaccagggaaaatgtgcagtagaatgaagtgtcaattatcacgttttctgactgcaaaatctcccccacggctgatgcaccatcatttactacaacagcccctcttgttggacatttccagtttatttcgtttgggatggtttgttgctgttgctgtggttgtggttttgttttattgaattttgtgttagctgcagctaataccatcttgctgatggctttgcgctgctcttgaatgattactcaggataaatttcctggagacggattataggatcagaaggtctgaacttctgtgtggctctagctacaaagcaccagattgctttccaagagcgttgtagcaatttataatccaacactcagcctattttttggctgggagtcaagccccagaatgtgaaggaggggtcttggcctggagcaggggctgagggatgggtgcacaggacccctccttattggttatttatggggatgggccaggaggagcagaatagaggcccctgccctcccagttgctccttggagtgactgaccccataggggaggggcgaggctacctcacatttagaactatgtagttggtgatggtcaaggtcctaggtctgatgggcatcctcctccctctcctcctcagccagtaatggctgcactatgtcgtatgtcctagatctgggtcccttttgctgtgggaacaccaataatacttacgctgtttcctgccggaaacggtgcaggagggctgtggcatggtagtgggccctggaaaccatctagccttcatgaggaagggcagttaaagcacaggcatgtatgatgttggtattgattaaaagcctcacgggcagagaaattcgccatctgccagggccccagccatacgagggctccagccatacatcctccaggagactgggacctctccaattgcaggagccttgccttccccatcagattaggaattccccgaggatggggacaatgtccttcccacctgcttgagaactcctaaggggcatgtactctgtctccccattgtatctggaacttcctgggagcatagctcctgtctccgtcctcagactgggaatcccctaagggcagaggccatgtccttccacccacttgggattccctgaagttggggaccacatctctgatgtacaatgctttgtatgtactgactgctgcaggattcttggagtaaatgggcagtcaacttcttggactggtattgaccatctggacttcatcagagtgtccaagactttgccattcattagacaggggccatgtgcacaggcagagccctggcctctggcttctggctcctgactcctggtccctctgctttaatttggctaatggcagaaccagactcctttctgggctgccctggaaggggatccttgaatgaaagaggatagatgggaaggtggcagctgacatggttacctcttatgccatgggggggctgctctctctggaaatttaggcctggggtcagggcactgttgagcattttacaccctaggccagaggaggggtgacctgtggagcagggctaagctagtagcccatgaggtatgatgtgtaggcagcacctggggctcacagagcctgttacccatgttatctcctctgaccttggaaagagctggggtgtatgaacaagtatttataagtttacaaaaatcatatgaggaaactgaggcacggggaaggtaaatgacatgccctaggttacacagcttataagtagcagggattctgcccttctgtcacaccaagtcccactgtcttttcttcctggagtccctgtgactgatctaaaggccacatgtttaacagaataaggaggaggcctctgttgcagcaaaccagctaccccacccgcacacagactctaagggacatcctgctttaagctgtccttagttactaatacctcagtgagaatgagtttgaaattttctcaagagccatgggagactaggaagtctctaagcttcatagagagcctggcttggggggacacaggagccaaaggcagaggaagaagtggcagctttgtgcccccagaaacacgtgctcctgacctcacagttggccacagccagccaactctcccatccttctcccaccactttcccgtggggctaacttcaccctgtccacacggagtgacttaacagtttaagccccagagtcgggggccggggtacctgggacaagagtcctgagggaaatggggtgaggaactggaagtgccacagggctagagttctgcccctagcctactggagctgtgccccacaggctggccccactggactgcgctgcctccaagccatcctgggcatctccatgtgtagctgtcacgctcctcccactaaacgcctccctgtgcttcctctgcagttttcatgaacacggccatccccattgcagctgtcctcatagtaagtggatcctttctccatctcttgggggtagggtggagggggagggcgtctgcagtgacaggctgcccagatttggcctttctgcacaggggcctcagaagacaggctccacagccagactgaaaataggatcgaaagtttatagagggtgtggcccctccccaactccagccgaacaggggcctctgcctccaggcctggaagaccggaggcttagtatttagagaaattaaactttcttttaaaaaatagctatccaaatttttaatttttaaagtgaaacatgtgtattgtagaagtgatgggaaatccagaacagaaagctcaaagagaattaaaatcacccataatcccactggtaacatttttaatgtgtttctttccagtctttttttaaggcctatgatatgtcattttctacaaaaataggaatgtgctatgcatgcagttttgcaacctgctcttttaaatttaggaatatgccacacacaattctccatgccactgaatattatgatggtggctttctaaagcaattttgataaaagctgtgtgtgagctgagccatgggggtcaagcagcatgctcctacagaaaggcctgggcccctacgagcctgcagccccctcacccagcctcccatccccatcttctgtgatggctgcagttccttaaaaagatctgcttatttcccccggggccagtgtccctgagctgtgtagagttcacagcctgtcggatacacttgggaattcacttccaatgtgatgtattgagctggttcctggcctggctcctgggggaactgtgggtaacagaggccactgagccagccaggtggctggggcaaagcactgtgcagtttcgtaatcactctgtttacgttatcccgatgaggactggggagatgagcaccccgcctgctgtctgcagagggggccgtgctgacctaacccgagatctcctccctgcttattcccagccaagactgggcaggacagggagtcttggccaggacagggagggagcagcccctgctctccagcttgaagtcctgaacttgttggggacgtttccatgagatgactgtggggatgatgaaggtgtctccaactaaaagatcctcttaggagcctgctccctgacagccctctcatttcccttccagtgctgagcgtttccagtgtgggagggacccacaccctgggccaccctggcctcacttgtgcctctgtccacagactttcgtgggccacgtcagcttcttcaaagaggccgacttctcgccctccgtggcctttgcctccctctccctcttccatatcttggtcacaccgctgttcctgctgtccagtgtggtccgatctaccgtcaaagctctagtgaggtgaggggagggtccgggcgagggcactgggcaggcaggtcctgtgtcagcctcaaggcttgctcgagtgatggccaaaccacagctgtttggtcccggaacacacccccattgctgggccttgctgtagctggtcctggttggtcagagggacattggcctgtatggtttcccagctcgccatccctgagcaaggacttgcttacatacctcccaggagaggggactcactgtcactttcacgacaacttaaaaaaaaaaaaaaaccagtgttgagccaaatgtggaatcctcctaaattctacccactggtcctaacttcaccctccagagccaccaagaatgaggccatcccgtccccacgtggctgccccatggatatcagaaggcatccactgtgtctatctttcccaggccaagtatcccctaccctttccacagcccctgagccctcacagcctcagccagtgaaacagcttcccccaagcgctgggtcctgctctgattggcccacagctcttggaggctcccacttccaggctctagagcctcatggggactctgccactgtcccagaggcattgccctcttgggaatgaaagcctgaaggtagaaggctgaggctttggctgggaaatgccctgtctggagtgagaagatgtccttgggcctctgaagtagctctgcctccttgaaagcaagagcctgtcatgcctctatggagggctggcttgtccttacccatggccagagaaccagtcagtaacaaatgtcctctgtgtcttcagccttgaggaaggtgacacccctgtctcatgggaccctggcaggtactgggaagctggaaggaaggagtagctgttggaatgaagtagctgatagagagggtagcttgcagggggagactctagcatgggttcaaagatggaatggggcataactcagcaaaattatgctctaaggagtatctgaccaggcagtagctggttaaacagggattagctcccatttccacagtcggctgtgctgactcagtttcttgaccagggtgttgtggggtctgaagatcacccctcctcccaccacccactctccagccctatgattctgtgtagaaaccacagatttaagaacgctgcacctgcctgaaaactgttgcactgatcccaaagcgttcatattttcaaacactctggatcccactgtttccaggaatggaacaccagagtagcagaggccttttcagtgaggcagctcaggctctggctgaaggtgggcgcaggacactacctgaagcttcaccccaagagatgagggccagctccactcttcccagtcaccgcctgtgggggagggaggctggacagggcatgaaggcagagcctggtggtctgcccctcccatctaggggtggcgcacagaaagggagactccaggccacagctcacttacaccccagaataaccttgccttgagggtgggatggcttgtctgccccaggcctgttggacatttagcaaaagagaagaaaggggaatacaaacaatcctgagcttcccagaaagctttcacacctccaggatgggagagaatgaactagaagagtgaagcttccagtgcttcctcaggtccacagggaaatctggacaggggagagggtaggaatagccgcctcccccgtgagtaatgacacctcctccagcaggctgttatggggatccgattacataatgctacaaaacagttaacacagtgtctggcatttagtgtatgctcacaaaatactagctattgattctttaccaatcctagtcctaactaaccttaaccctgaccaatccaacaccaaccatccttcagtctaataacccagactaactaacttcaacattaaccctaaaactaaccaatctcacctccaatccagaccccagcctattccagctgactggtcaaccctagcaaaccctggtaacaccaattacctgcccccatgcccactggtctgcccccttcagtgtgggctttgtgggactatacttcaggcctgagatcctgctcagagctctctatcaggctgcgccctctcccctcccctctgcccctggcaggggtgaggggtgtctctgtgcttcccgagcagcgtgcaaaagctaagcgagttcctgtccagtgcagagatccgtgaggagcagtgtgccccccatgagcccacacctcagggcccagccagcaagtaccaggcggtggtgagtgcccggcctccccttgctactcccagcatggtcctctaaggcccaaaacttgggcctgctgtgtcggacttctgccttttttcccaggaagaggggctcccttccctacacagctcccagcccagtgggtcctcacctccaaaccacccccagcccctcagggttgtgaaccgcaagcgtccagcccgggaggattgtcggggcctcaccggcccactgcagagcctggtccccagtgcagatggcgatgctgacaactgctgtgtccaggtgagtcctgctgccccatgcctggccacccagcaccaactcccagagggagctcagcacctggaaagccagaaagctgcatgcttagtcctctgcagaggtcaccctgcctgcctgtacggtccataggagtccagaaaccagggaccaccaagtggggggacccccagccttaggcaagggtcagcatgagaaggccagtctcccactcccctgctctggaagtgatccaggggctggaatcagtgtcttttggctttcatggaggaggggaagccagagactattcactgggaactggctgcctttctgttctctcctgggcggtgggacacgcctaatgaagatcatgggaggctacttcacgtggaccccagatggaatccccacactgtccaacatc

SEQ ID NO: 15309 - DNA, 46160 bp, Homo sapiens
gagcccgagcccagcccgcgcccgcgccgccatgcccctggccttctgcggcagcgagaaccactcggccgcctaccgggtggaccagggggtcctcaacaacggctgctttgtggacgcgctcaacgtggtgccgcacgtcttcctactcttcatcaccttccccatcctcttcattggtgagtgcgcgcagcgagccgcggaggaggggacgggagagcagggagggaggaggaggcgctgcgcgccgcaccgctcggcgtccccttccggcccgcgaccgccgtccgcctcgttcccggggtcccctgccctgtgtcctgcccgccggtccccgcactcgcacaccagctcatcccttcactcccccggtgcccccgatcccgcgccaaacacagcggacgtttgtgacccatgggatcaccaagttttgcttctgcagggccaagagctgggatggggaaaagggaaagaggaggtctcagcacgcagtgggaaactggagaggggtcgggcctcaccctccgtggcgcagcttagggagccgggtcacccctcccgcaaggcagcctccctgtcagccgcagctgggcctagggaagagggaagcctgtgctttggagtctgggatggaggcccagctaacccctatgctttcaccgggctgagccgcgcagtggtccgtgatctctgacagtcccaggcccgcgccctgggcgaggagaggcgagagctagggacttggattcccttcccccgccaccccacccgggcatgtgtctccagagcgcaacttctcaggctctgcgcaaagtagctccgactcgccgacgcagcgaccccggcgcccttgcttgcaaagttgggcgccacggccgggacaatcgtgcgtgcctctccactgaggtcccccccatctctctccaagaccttgactcttccagaccagtcaagtctatcaactcatagggtgtcccctgcatccccaaaacgtgttcattcactttaagaaaacaagcaaatcttaaaattcatatacagctttggggaagaaaggaaagattgtcacaaaattagatttacaagaggttgctgcagaagcagagttgctagttattaacaaagacagttagatagaaatagaaataaaacatacaaaatatgtgctcatatgtgcatcaaaaatcaaaaaagaacagcatttacacttctgttctcagccaaacggtttattaacctgatgacttgtcacacaagaagttagtatgtataatggggtaccttggcagggcacagtggcttacatctgtaatctcagcattttggtgggctgtgacaggaagactgcttgagtccaggagttcgagaccagcctgggcaacatagtgagaccccccccgccctttctacaaaaaattaaaaattagctgagcatggtgatgtgcgcctgtagtcccagctactcaggaggctgaggcgggaggatcacttgagcctaggagatcaaggctgtagtgagccgtgatcgtggcactgcactccagcagaggcaacagagcaagaccctgtctcagtaaaaaggtgtggtgggggaggtaccagcataggaccaggctgaatgagttggacgtttagtttgtgtgtaccagccttggggatcctcatgtgtaggtgtcaccctcaccatggacccaatgcccaagcacctttctggggttcatgcaccctcttcctcctccaagtgggcaggcatcctgcctctgactgtctctccctgcaggatggggaagtcagagctccaaggtgcacatccaccacagcacatggcttcatttccctgggcacaacctgcggtggatcctgaccttcatgctgctcttcgtcctggtgtgtgagattgcagagggcatcctgtctgatgggtgagtgactgtctgaggactcaggaaagtgaatctgctccagggtacttcctgaaaggcccaaggagatcctagctcacctatattccacaagcccatgtcttttgttactacatccagcagctcagtgtcttctatgtgccaacctctctgagctgggcactggacgcaagtgagtcccaggccctgccatcagtccaggagagcagagggaacacggacctgcatgccaagtcccagtgaaataatgctagagcctattagaatgccacaactccagtgaaaaatgtctggcctcttctacaacctgccggagttaccttcttggaaaaaaaaaaaaatctaaccatgccacccactcttgcataagacctttccttggttctcagctgttttgaagatgtggtctcagatcctcagcccaccattcaaggtcttcacagtcagccccacctatctctggcctcattccccatgcccaccttccgtttgggcctcacagcacactcctcacacctctgctacagcacagatcacactgtatgttaaagtttatgtctatttgcaaaactgtcttcagagtcagaaaggcctaagagttagaatctgagtcttgttcatctttgtgttcacagtgcaaggcatgtgataaacataaacattattcagtccataaacatttattgggtccttaggagaatgaatgaaaccatgttacaaataagtactctgggaggtgagaggaaggcagaattgggcaagctccatggttgagagggctttggagcggagtctggaagggtgactaggcttcagacacacagaggaggaaggagagagagaactggtggtgcctgagggaagggaaaaggcaccaaagagaaaagcaggtagggctagggagcagcgcaggggctggagcattaaacacaggctggggagcgatggaggctgaggctgggaacccaggttggggcatctcaggaggactgtgaatcccagcctgcatgtttgggtcggatttggtcagcagtttggaacagaagagagatgtcatcagcataacacttttaggtgggaacctgaggtgttcagcgcaggctggaggcagggagaatctagaggtataatagaagcaggacttagcattgactgcagtagtctaggtgagcaataactgcagacagaaatggtgtgtcagcagtcagggacagaagaggagcgggagcagccatctcactaaggaagaatccagtaaccagcaaggatgagagactgccaggagagggagtggtggaggagagggatatttggcttgagtatctgaggtccagcgccccctgagctggaatcagattatacccagactgcactcctgcagtgctgcctggctcctgtagttggatggcaggggataggctccctcatcctccctcccgttccccaccttcccttccccaatgtccctgcatcctggcttcagcagtgatctctaaaatacctgcttgacttggaggcagcagctctgcctgcttattaaagtccctagaccagcaagaagaccagaaggcatactgctacacaagcacgtgacaagtccgcctccacccccacccctacaccccttccaaagtagcacaaatgccacagtgagccctcagatgggaaatactcaccagatggtgacagagaaagacacctccgcccttggagaaggaagacctgggtcttcagtgagcactgctgctgtgtaccagctatgggactttgcacaagtcattcaggctttctgggcctcataagcatttataaacatacgataaaacattttagttgccaacttaaaaatgtgtgagaaagtataaggtgtttcaaaattatttcaaggagtaaagaggcaagagttttgaagatccctgggcagggtgttggctgttcccagtgtggccattcatgactgctctctggccttatgaaacaagcatcatagtccctggcttgcctgcttcatggggctgtggagggtgaaattcgagcatggacagggtgcagagcccggagtggcagagcactgggtagactgtgtattcccagaatgtgggaaactggaatgaatcggtccagggatgccctcctgctggctgtcagcagcccctcctgtgtgtggctgtactgcttcagctcagtgcaaagggccatctcctccccagggcacagatcagctcaagctgagtaattgtcatctggtctttgtgagctcctacccccaggcctgagtgaggggcaggaaaagagcagacaggagaagtcacagacccttgtgatacctccagtctaatccagcctgggttttcagagctgtctggaaatttagggggcaggtgggagggggctgattaaggcagccctgatttgatttagagtgagcctcatttagtgactaattaagccatcttaaacctgtagggcttcccctcttcctttgggtattatttctttctgtgatgttctgaattcagaacaatcaaaacagtataagttagtgaagaagatattttttaataactacaatattttcccagaccaccatacactggataaagcctgtatataaaactttacctaatttcttaactaattgaatgtgtattatttaacaaagcagctaaaaactattctatgaagccatgtcatgaaatatttagttcaattatggttaatcctcatcttatttcgtcttataaaattttaacatttctacctcctattgcaaaaaaaagcatttatatcagcatataataaaacatgtctagatgtcagcttaaaaatgtgtgagagagtagagggtgtttcaaaattatttcaaggagtaaagaggcaagagttttgaagatccccaggaagggtgttggctgtgcccagtgttgccattcatgactgctctctggccttgtctgtcttgtaccttctatattagtttgaagaccttttttggagaatattcactaaagaatatcaatatctaccatttcattaaaaaagaaatgtggagtttgccttttcaagttggtttgatgcttattgatgttttcagggacccagcctcttcccatctttccataccatcctgtgtgtgtgtgtcagcctatcttccccatggtcacaaggtggctgcctagctccgggtattgcttagcatgagcagagagggcatgctgccgacatgcctctcctttatgacagagatcattctttctttgacatctcactggccagaatacgtggaccaacactggcaaaggagtatggaattgcatggctgcttaaaccaatcaccatccattccctggggctgggtatattgctgctggagcaaacctgtggtcctcctggcacagaataaggggaagatactctttggtggacagcccacattgcctctacacttgcacctcagtcccaccagacccactgaggtcacaggatagctctcctcatgtccttcctccttctctgttgaactcttatgtatccttcaaagtccagcctggtgccacctcctctgggaagctgtccttggttgcccaccccctcctttgtgctctctcagtctctgtccatcggcagtatcacttccctagcctgctgactccaacagttagctctgagcatggcagccccctccataccatcagcttctcaagggcagggacccttggcacactggatagaagtagcctggtgggcaacagcagcactgaggcagcaagctgtagcaggccatctgggaatggagtgggtaccacagggctggagcagaaagggcaggctgggcagatctgataaagtggctggaggccacatagcctgggcctttcgttccaggctgagcagagtgggttttgctgtctgcaggagggagctgtggaagggcatgatcacgaccaactaaggtgaccctcctcaccaggcccagggaagactgaggcctggaaggaggctctggctgcctctgggtcttacccccaggccacagtccacccacttagaggcctctgtgagttaaggtggagagactatgagctggtattgactgctccattccccatcccgagagaggagacaaaatcagtgaccttggaaatgcctcttcgtgcctcagtttcctcaccccataaaatgggagactaagagtacccactcgatggggtttaatgaagattaaatgggttaacatatatcgcatgcttagaacagtgcctggcacagagtaaatgctccataaatactgactctcatcagtttgttatcacagcctctggggagggcgccagtgctgacttatgctgttcgtgttaaatggggctgtcactgggtgagttgtggcatacaggcccctgcactgttcaagagaccccagcaacccttgtgcttagggctcagcacatagtaaggcctccagatcatatacccagctctactccatgtactggcagctctgcccagcccataccccaaatacgcccattaactaaagggccctgcagcctataaagtgatgctataaaggttcagtgttcagcctttgaaattcaaggcctgggctgctctattgcagtacttagcatgtccccatcctgtctgtttctctctcccatctcagggtgaccgaatcccaccatctgcacctgtacatgccagccgggatggcgttcatggctgctgtcacctccgtggtctactatcacaacatcgagacttccaacttccccaagctgctaattggtaggtgaggtgtaggagggaggggcagtaccttcattcatttcttcagataatgtttactgaggactcattatgtgccagctattgctctaaacagtagagatttggaatagaaaaagaaaaaaatccctgccttcatggagcttacagtctggtgaaggaggatagacaggcaaagacagtgaataaacaagcaaacaaataggtggtggggatgctatgaagaaaatcaagctgagtaaggggtaggggcaatgacaatgttgctatctacacaggatggtcagggaagggctgtggtaactgtgggcatgcagatatttgggggaaggtattccctgcaaggggagtgacaagtgcaaagtcctctgatagggatagatttggcaaagatgtcactgtgggcaaagccaaatgagcaaggggaagagtgggaggtgagggcaggcgtcaggagaggagcgagcaagagtcccaggctctgggcctgagagcctgggtgaactgtggcatcaataactgatgtgacagaggagggggaggtgggctgtggtggggataaagttttctactgggggcatatcgagtttgagatgtcacagagacagccaactcaagtgtcaagttgggctttcatggggaggtcaggacaggagctacactttcaggaggtgggccttgtagatgacatctaaagcttgagcctggggctggctgccgtggctcacacctgtaaccccagcactttgggaggccgaggtgggcggatcacccgaggtcaggagtttgagaccagcctgaccaacatggagaaacccccacctctactaaaaatagaaaaattagctgggcatggtggcacgcatcggtggtcccaggtactcaggaggctgaggcagtcaaatctcttgaacccaggaggtggagattgtagtgagctgagatcgcgccactgcagtccagcctgggtgacagagcaagactccatctagaaggaaggaaggaaggaaggaaggagggagggagggaagggagggagggaggagggagggagaagaaagcttgagcctggatgaggtcacctggggagagaagagaaaggctctgggaccagagcttgaggtttgctaacatttagagagactcgggaaggactgcccacttagagcttctgagatgttaaatactgcaggactggggtcccaggcagaagcaacaggatgatggttggtgtttactgagcatgtgccatggggcaggctccatgccatgttccttacattcattgtcccacaggctaattcccccagcctccttattggtattgttaatatccccattttccagtgtggaccctgaaactgagaggttaaaaataataacagtaaatactcactttgtacttactgtatgccaggccccatcctacctatgtgatatattaattcatttaatccttgcaacaactctatgaggtaggtaccattattattttccctttacatatcagaaaactgaggctcagaggttaaataactggcactagtctagctcgtcaaggggcacagccgggagtctagcatctgtgcaatctcctaatcatttctgagactgcgtgtctaagggccctcagacttcgtccttggggtaaaggtatcaatccgcaggtctgcctctgtgttggggttcagcctgtgtgtctaaggctggggctgtacatctggcagttagactttgttcacactatgtccttaagtcagactgatttttaggtatcacagcatcgaattgacatttggagtctggcacactctgtgctaagccagtgacatcatggtgttgtcagggagtacagggtgtttcttgcactagtcacaggtctgcctttctgtagaaggtgggatctgagctccattaggattatccaggtgatccccctacccctagcccaggggcccccacatgagtatgaatgggagctgggggaagcaggttgagaggggagatgttaaatacaggcttcagagagccaccctgcttccatttctgaagtagctccttgtctgtagagaacccttcattaaccagggcctggctgaccagtgtcctctggaaacaccctgtctggacatctgaggagttcattttctcattctccagcaaacacataatgttctctctttaaagcacaagttatcacccgtggatggatttgtccttttctaaggaacaaagactaactccctccattccccttgttggagttatctccccttgaaaggacactccacagagccagaaattctagaacagggaaaagtggaggggacgtgcctgtgaactgcagggacagaaggaaatgggtattgggagaatggccagccctccaaggggctgatgtctggcctgggtatggagtcccacagaaaggggacctgtgatgcagcttacattgtcccgtgagggaaccatgatcctggaacccagatgaggccaaggaaatgttctctgaaaaagtcatatttgagctgagaactgaaggaactaactgggagaagggaggaaagagtgcttcaggcagaggaaacagcatgtgcaaaggccccaaggcagaaggaacaaaacacattagaaaattcagaagaagaagagtggcgtgggtgcaaagtggaggggagctggactttgggttttgtttgcttgtgcccaggctggagtgcagtggcaccaccttgggtcactacaacctccgcttcctgggttcaagcggattcttgtgcctcagcctgctgagtagctgggaatacaggcgtgtaccaccacactcagataattttttgtatttttagaagagttgggatttcaccctgttgaccatgctggtcttgaactcctggccttaagtgatcaggtctcaacttcccaaagtgttgggattacagccgtgagccaccgcacccacctggaaggtcataccacagatgtttgcctttatcccaacagcaatgggaagttgtgtgtgtgtgtgtgtgtgtgtgtgtgtgtgtgtgtgtgtgtggtttaacatgtttaacataaaatttatcatcttaactgtttttaagtatagtgttctgtggcattaagtatattcacagccgggcatggtggctcatgcctgtaatcccagcaccttggcaggccaaggcaggtgaattgcttgagctcagaagttcgagaccagcctggccaacatgccaaaaccccgtctctacaaaaaacataaaaattagctgggcgtggtaatgtacacctgtagttccagctacttgggaggctgaggtgggagtatcatgggaggctgaggagagaggatcagttgagcctggaaagtggaggctacagtgagccaagattgtgccactgcactccagccaagattgtgccactgcactccagcctggacaacagagtgagaccctgtctcaaaaaaagaaaaaaaaagtatattcacagtgctgtgtagccatcaccactatccatctccagaactttttcatcttcccaggttgaaactctgtactcattaaatgataactccccatttctccctccttacagcccctgacgaccaccattctactttctatctatgaatttgagcactctaggtacctcatctaagcggcatcatgcactgtctttttttttttttttttttttgagatggagtcttgctctgttgcccaggttggagtgcagtggtgcaatctcggctcaccgcaacctctgcttctctggttcaagcgattctcctgcctcagcctcctgagtaactgggactataggtacctgccaccacgcctggctaatttttgtatttttagtagagacggggtttcaccatattggctaggctggtctcaaactcctgatcttgtgatctgcccacctcggcctcccaaagtgctcggattacaggcgagagccaccttgcctggcctatttgtctttttatgacttgcttatttcactgagcataatgtcctcaaggttcatccatgttgtagcatgtattgaaatttccttcctttttaaggctaatattctactgtatggatatgccacattttgtttatctattcgtctgtcagtgggttgcttccacctcttgactcttgtaaatagcactgctatgaacatgggtgcattgaggggttttcgacataatcataataattgctttatggagaccagcttggaggagaacaagatggggaggaagtgtggaaaccaatgagaaggctctcagggtatagcgggaatacagaggacgcatgatgatgcctggacttaggtggtaccacagggatggagagaagtagatagagtcaagctatttaggacgtgaaatagacagcatttgttaatgggagaggtgtggggcgagggagaagaatagagggagaaggaggagtaatgggagctcaccagcagcccccatgttatgcctctttccttccttttccctcttctctcatcaggcattcagcttttgctgagtacttctgtgtctgacaacaggctgagcactcagcactgcaggacaggactatgcaaaaaacctctgggcctagtcctgggtgcactgctaattccctgtgtgaccttgcacaagacatccaagctctctgagcctcggattccccacctgggcaggaagagtaagtccctgcctaagtcatagggttgtaatgaagagcaaagcagaccatatctgttaagtgttagggacaagacaagcatgaggcatattttcaagtctcggctcctgtaggcagctctcactaagggctaaagggcttctgatgcctgggatagaatctgtccggcagagtggagtggaggcagggggacagccttcagctgtggaattcctccagtcctagagaccagcctgagctgggggacattattccagtcctgaggcatgagagcagaaggccgatgcttctgccctccatcctaatgtcctcctgcagggacccaaggtggatggcatcgatccccccgggtgagctcagccctgggcgcatggtggggcccaacatctcaacctgtttcctaaccctgagccaggcaggacagatcccagatttgtgcccaagagatgctctggcatccatgcccaggcccacatagggatagagggcagggtgaaagtctctctccctcactcgggtcctctggagaggggctctgtgtcatgaagctgaccttatccgcatctggtctaggagggaggagggaaggagctgccagtgctaaaatctcccccaccctcaaagggggacttcacaggttattgctggttttggttgttggaagctgacagtgatttattggcagattgaagtgagtgtgtgtgcgagaatttaggatagaatctactgatagcttctgaggtttaccttccccaggtcttaaatctggagataataaaaatataacagctaatgtccaaagagcacccgctgcgtgtgaggctcactgcactaaatgctttccatatgtttctcacaagaaccttctaggtagcactattatgattcccacttaatggatgaggaaactaagctctagaaggctaagtgactaatccaaggtcacacagctattatgtcacaggctctgagcccaggtgtatctggctgcggagccaccaccactaacccctgtataacgctgcctcacagaactgtggctggctctttccgtatcccccatgcccctgctccatcatcatgctgtggtgggctctgaactgtgaggacagggatccaggctttcaccctctctctgtccctagctgccagtgcacttgggcaaggtcacatcctatttctgggcctcagtttcctcatctgtaaaatgaaaggctggattgaatgacctttaagatttccctcacttggaaattccacaagtaagtcattatagcatggagcttgcatgcatgggctccagcgtcaggccagcccagctctgccagttaatgggtgtgtggccttggatctgttacctaacctttctgagcctcatttcctttgtctgagaaattgggggtgacggcagtgtactttctttgaaaagttatggtgaggaatagataagatcatgtgtttaaagtgcttacttggcacagtgcctgtaacttagttaaattcaataaataaatttcccattcttcccatgatcatttatttttaagggacatttgtctgaccagtttgatttatgagattattggtgtttttcatgaatgttaagacgtacgtgcgtcatcttagagtcatgtactctgatatattcacacgtgcacatccacttactcggaaatgtacacacccaggcacgcttattctgtctccttctctgccacatacttgcacacattatgtgagtgtacacacatgatgcacacacgtctctgcgatcttccatctctcctcggcagccctgctggtgtattggaccctggccttcatcaccaagaccatcaagtttgtcaagttcttggaccacgccatcggcttctcgcagctacgcttctgcctcacagggctgctggtgatcctctatgggatgctgctcctcgtggaggtcaatgtcatcagggtgagggtaagcaggccacctgggccagggtggggtgggaagcagaggctctggcctctgtcctgccctgggttcaggcccccaccctgcttctcagccaaactgagaagggatcagcttgttttacccgcccgtgtaaaggggagtggggccgtggcggaaatttcaggatagacactgcatctggcccacgtgtgctctaccccagggtcccagagggagaggggggtgatgggtgtgttcgctgaggttggcggatgactttccgtagaaagggaagataagcatcaggcactggcctctcctactttctttcttcgggggtgggggactttgctttaatgtattcatatcgtcacgctggtaaatgaatgagtaagtgttttgttttcctttctgtttgctcccgcctccctctctcttcctcaccccagactccaaccttccccttcccctgcccctacctccccaggcagcccagactaatgaactcgtttgtctttcccatgctttgtttttattagtataataccatatgtgtctgtctaaataaatacctattcaggttttttcctctcaacacaagtgaatatgtaggtttcccccacggtatttatcttgtaagaatgggatcatattatgcagttttctgcactgtgcttttctcacccaacaaatatctcttgggactccctccaagccatctgatatggctaattccgttttcttaatggctgcataatattccatcgtatggatgagccataatgtgttcagctatttctctatggatgggcatttactttgttgccaagttcttgccttcatgaataatggtgtgttgaacatacttatatatttatgtattgctgcttttatttctatgggagagagtccaaggaatggcgttgctgggtcaaagggtctgtgtattttaaattttgatcagtgttacatattgccttccagaaagactgtaatctgccagcaatgagtgagaaaaccctttccctgccttccaaccagcagtgagggctacagccctttcgaacttggactgcctgcatttctctgactcttctgcttttagttggtgatctgcagggcacaaagctccttatgtgtccccccatccagtgaccctcacaggaaccctgtgatgcaagcaccatcccctttatagatgaggaaacattttagatgaggcttgtccaaaaacaccttgctagtaagtggaggaggcaggattcaaaaccaggtctgcatgacttggagttctgtgaactgtatatgaaacatggtggtatccttagatctgtggagaagatagcatatgagagattcctgctcctccccaacccaacctaaacccaacccagcctagccatggggggttcaaagtcgacctcaatgagcagttacaaagtcaggatgccctgacattggtggccaagaagtgttggggaatccttttcctggtaataattacaggcgaaagatggccccatctgttagagatcaagtgtggaatatcacaaccccagatccttgctggggcaaggtagggagtggtgagaagttggacttacccatcccccatggcccatgtgccccacagagatacatcttcttcaagacaccgagggaggtgaagcctcccgaggacctgcaagacctgggggtacgcttcctgcagcccttcgtgaatctgctgtccaaaggcacctactggtggatgaacgccttcatcaagactgcccacaagaagcccatcgacttgcgagccatcgggaagctgcccatcgccatgagggccctcaccaactaccaacggctctgcgaggcctttgacgcccaggtggtcagtgggggcacagccacaccatctattcactgccttctggtttagggtcacagagagggacctcaaagggcattaggtcaaaatcctggtgggacaagaggggaaactgaggctggtgaggggaagaagcttgccttaagtcacacagtgaaccagggacaggtgcagggctgaggattcataggacaggcacagttggaatggcccttaccgtttaggtcgtctagtccaaagtccttatccagatggggaaactgaggctctgagaagggaagtgaccccactggactctcacatccctgtgctctttcctctgcagcttactgactataaaggttggagtgttcacttgatttggagcaggggtgttagtggcctgatccttatggtaactctatgagttgagccagacaggaatctccccatatcactgaggagcaaattgaggccctgagaaaggctgtgacctgcccagagctggccacagctggcaggcggcagaggcagtctcctggctcccagtccagtgctccttcacttcctctgccctcgcaccagggcagttgctgaggcagacacggtggcaggtggtaatgagtgagtgtggcacatggccacctcctcattccagtgctgtgctcatcacatagtccctgaccagctgtgtgaccttgagcaatcatctggccttagtttccccatctagaccatgttggtgttgatagggccctcccaactgtgcacttgctgattccatgatctcttcctggagttcacctatttgcagaggatgtgaccactgggtttccccagacaacaggagctaggggcatcctgggaggctaggcccagccgtgaattagccctcaggcactctgacctggccatggtctctctgggcagcggaaggacattcagggcactcaaggtgcccgggccatctggcaggcactcagccatgccttcgggaggcgcctggtcctcagcagcactttccgcatcttggccgacctgctgggcttcgccgggccactgtgcatctttgggatcgtggaccaccttgggaaggagaacgacgtcttccagcccaaggtaggcagccccaggggtagggtaaggcaccctctagatggttttcagttgtttctgagagtgcaacaggccaatgtgtgtgagccatggccacactggagtggctcctcacacatgcgcaaagcccatagcagtatccccaccacagaatactctacatctggtcaacagaaatgccagagggcgagcctatgccccaagggtatcctactctcctctcaccgtcactaccatagtacctctcccggtagttaggtcagtccgaaaactgcaggaagtgcttttgtttgtccagtgtctagagcttctgtgacttggatttgttggctttcagttcatgtcatcttagtaaactctttaaaagttttcaagatctgtcttcttcagtcctgtaaaggctggcacttgagctttctgcaggggcatcttgggagctactgtcagaggagagagaagtgggaaaccctcacgagtggagctttgtctctccccactccaaatttcattcaaagctgcccgtagttttattaatatgttggacttttccattaaaatttcttttttaagaaaagtttccatggcttaaaaaacactggagacttattagactagattatatccaatggccttggcagttgtaacgattctgcaaactgaaatttgttggagctagaaaacctttccccggggttatttgccctgcgtggggccgtagcatccacttcgggggctgggcagactgtgctctgttgtctgtttccttgcagccgtttaggtttaaatggccacaaaatgaaaactttttcacccctaataagtttcagagttttagtttccaagtgaggatgtcattataacattttaaccacagacagtctgaaaataatgcagagaatggggaattagggtttttaataatttatgacaccctttgcgtaacatttgttcatctcatgagctccaaaatcgcagccagcagttaatcctcaggaggtttatgttcatttttctggagacataattagtcagctgaacagttttggccacagatatgagatacgttgagtctgatttatgcagcaaactttcattgaacactgctgtgtgccaggcctgggttgggctgtgggaatatgaaagcaatagttatgatgaggatgattaacaatattaacagccacttactgaccacataatacatacctggctgtgtgcaggagttatccatgtgttatttaatccctaaaactatcctttggcgtgagtatattttgcaacatctttactgtggtatacctcaaatactgtacagtttatgagatgataggtattcttatccccattttacagatgagaaagttgaggctcagaaagtttaagtaattttccccagggtctctcagctagttaataacagaggcagaatttgaacacaagactcactccacagtctgggcatttacagccaggaagctaaattgactattattatcaagccatcacctctggctccaaggattatgaaatccaacagtgaggagagaaatcaaaataaaatacttttatgctatgtgttacatgtgactcttaggaggaatattcagggaattgtgggaaaagatagtgattaacttagccagtggtcatgaacagcttcatagaggaggggatgtttgaaaggggtcttgacggatgagtaggaatttgccaggctgccatgggaagatttcttgctcaaccaagaatgcaaggaccacttttgcttatttaaactttgatggcttttgaagccatatctggctttttgagcctctctactttacctggcccataaaagagaggggaagcggctgcttctcttgtctacaggagtgtcacctttggctctagcctgaccataggctaccccagaatacccccattggcgatcctgaagcagcatggagccagttgttaatatcagggggaaatggcacaggccagagcccttatcagagtgtccacaccacgctcttcttcctgtgtttcccaaaacccttgtgggattctgctaaggagagagctctgaggcaggacgtgccaaagagatggcgaaagcacttagaattttagttcatctgaacgttatcattgccgtttttttctctttgtttatacacaaaccctggggtttattaccgtctcattggaatgctcttgtcccagttacttagcacacaaatccctgagacagatggccctgcctcagtggcagtgggccttatcagatttaatattttttccctgcagcccaaacacaatcagaaaatttccgacacagaaacaagagttgaaagtaaatatagtctccagtgtccgcaacaaagaactctccatcatgtggttgcctgggatgtggcttaattctcatgtgggcttctgagctcagaaaatgggggaaagggatcatttactgagatcatttggttcatctcccagcccccaagccattctaatccagagagaaccgagtgctattctggtctttatgaatgacaaagaaggaagctccctagctacatgttgcagtgtttcacagtctgggagaggaagccgttttttctgcccagcctgaatccatcctgcagcagttggcacagcgaggcacctgtggtttattcatcatcactcttccttcctaagatactcagagttggcaagaaacatgtcatccttggtatccgcaaggacgaacatttctgatgtcctctttagttactgaaagtgtctgtgacttgccagatctttgatgctcctgtcaccccgctgccactccccagggaaagctgggacccaggttgggctctgcctatgatctatagctctttccagcctcctctccaacccaacccctactcccaatctgtcacctcccatggatgccactgatctggctgaaggacaagagaattagattcataatgagctgctggtgtctgaaacctgccagcactgccctgggctatcagttgagccaaaggaagaaggaacagtctgggtttgatcgaagggctaaagcttcaaacagcctctaagtctcagtaggaaaatgtgtaggtttgggagggtgtatgtgtttccgaatgagttcccctaagaactgcttatggttctatatgtgtgttctgtttgtccctgtgtcttttggtgtgtctttttctgcgtgtgtgtgtgcatgtgtgtgtgtctatgcccccgtttggattgccatatttgtggctatcattatgagtgacttaatgagtgtatatgcattggtgtttctgtgactttgtggttttgatgcatgggctggcctcttcataaccatgtccatgcagctggtctggcctagagtacctgccttcaattcactagctccttcttggccatcaagactctgctcaaatgtcacctgctccagggagccttcacctggttgaattagatgccccttatctgtgctcacataacatcctatcaaagcgccctgtttctttccctgacttgatcctctgtcccctattgcctgacctctgtgtgcccagcactcagcccactgcctgacacccaggagatgcacgggaaatggttctgcaaagaaggaataatgcagcaattactatatattgagtgcttacacttactgttttttcacatgcactgttacattgacttctcataacaactctctgaagtcccttcatagcctcaccttacagatgaggaaactgaagctaagagaggttgaggaacttacctaaggacacagtggctaatatatgatgagtcaggacctctaagtccaggctcttaaccaccgtgtcaaacagtcttgtatgaatgggtaggtgtgttggtctctgggtggccaaagataattttattctttacccagggcctcccggggctgggacctacggacaactcaccttttgacacctgccaaaataggaaacaagagtccaagtgatcccctctcctttaagcaccagagaacatgtgaaggggacctttccaatcatacctctggcctggcagagacaatggggctccaaactgtagagtcgggagtgctgggttttagtcctacctctgcagctaactcatttattctcctcagcagtcacattctgcaagcctcaaatgcaaaatgtgtaataacttctgtagaaagtacatgggggcatgaagatcattggcttgattgcttttaaaaaatcggtattgagcactactggggaaatccctggaaacaaacacaattcttccctgagagcttgtgaaaatgcaagactagggcctatgattttccaaagcattttcttccaccaagtgtcaggttgtaggtccttggtcttttctctcttgccttggtacctgcagggtgctgaccagtgctatcatatcccctccccgtttcctaggaccctcttctcggtagactccaacagggcctgccttccttgggcagcatggcaggcctcttggctagtctagtacccacttcttttttttttttttttttttttggatggagcctcactctgtctcccaggctggagtgcactggcgcaatcttagctcactgcaacctctgcctcctgggttcaagcaattctcctggcccagcctcccaagtagctgggattacaggcatgcatcaccatgtccagctatttttttgtatttttagtagaaacagggtttcagcatgttggccaggctggtctcaaactcccgacctcaggtgatctgcctacttcagcctcccaaaatgctggaattacaggcatgacccaccacgcctagtcaggtacccacttcttaactgaaacttagctattccaggttctatcccttttaaaccaactctttgaagagaggtctaataatgacccaatgacttatagctgcagtgagatttttattttaacaggtcacaaaattctcaatccacaaaagtagatttctgaccctaggttattttgttgggggcggagagaggaagtcaaaggttttgcagcctttagagctgcaaaaccagaatttgttgttttgttaaaaatgcacaaataccgacgagtatatttaagtaacacccatagtctaacgaacaaacatgatcagttggcttttccagccctcattctccagcctgtgtgttttctgctcattgtaacacagcgtgtgtgtggcattccatgtttctccagagctttcatgagaatcagtggtcttggatgcatagtgttcccatgagtaccttaattacctaaccattccctgtggttggaaatttatatgggtttttgcattctccttctgctctgaccccaaaataaatgtctgtgttcatacagctattaccttatgtgaaattattttctttgggataaattctcatgatgtgttgttgctttaaaatagtggactccagtctccagagctgcgtctctgcagaggacagtgggacagaagaatcccagggcatgttaaaaaggaccgggtcttcctaaacccacatgcctatatttctgacccagtaccagccaggggggcaagtttccatcccccacaagtcacaaacctgtaactgacactaggatgcttaaggtcaaaggcctggacgaggcctagacagtgggtctggggtagtgtttttgacatcactcaggttcatgttcacatgttgtccccttaccagcatgtgaccttgggccagccactaaccctactgaaactcctttttttcatgtatgaaatggggctaataatggtaccctcctcattagggtattgtgaggatagagttttgcacctgataaatattgtctcctgccccttcctcccctggaaattcaggtctctccctgcagcctaattttaaggcccatttttctgcttccagcccacccctgcccttctaccttcgacctcctccctctgcctctccctctggtgcactggcaaatgggacagagagcctcggtagggccttcctcttagagtcttgcacgcatccctcagtggtctccctgtggctgcttcctgctgccaccaacagatacagacccctgtcgcacagatcatggtagagacagtggtgagcaggaccagacagctccagggagcagtgagggctggcttagagaacctctgttaaactgagaggccaccatcaggaagctctgatccaagatccaggaatccctgactctagggaaaggcctccaatgagagcctgggccctctctgcctgattctgattgtggatgtgccctcaaactccttctcatcactttgttccatccctctttaccctgcagcagctcccacaccctgccaaacaggatgcacagtccagggcagtgtctgagaaagagcagagatctgtcttcatggaaatattgatgtggctctgctggggagcaatggatttatcaagatcaaagttttcctgggagttattgatgcttaatttggaaatagacacactgttgatccctggtatctttagcaacaaagttaaaatgtttgtttttcttcactggttgccatctgagatcttgccggaagtacacaagagaaccttaaatttaacaggaggccctgggagcccatgaggctggcgggcttgggtctgaaatcttttcagtctcttgtaagtgatgagctctcattctctcctgagagctctacggtgccatgttttccactggccttttctgctcagtaattgctacattacaggctgttggtaagttcggaacaagggagctgctgattccatttctgtagcagagaacatgcaccgtgagacttgttgtaccagttcaggttttaggtgctctatttattcttgccccattcagaatgctctcccctgggtctgtggccacaatgctaagagtcatatttatgggcctgcagttgtaattgggccccattctgttcccccaagtggaaagatgaacagggtgtaagcaaccttccctgtagttagaaaaacgtttagttggatttatcagtctgatttttcactcataaacaattgcacaagcctttgcaagcccagagggtcttgtaataatgatggccgtggtccattatggcacagtgatgtgttctacggtggtcattttgctggcaatgacagtcacctctgaacttctctttccaacagacacaatttctcggggtttactttgtctcatcccaagagttccttgccaatgcctacgtcttagctgtgcttctgttccttgccctcctactgcaaaggacatttctgcaagcatcctactatgtggccattgaaactggaattaacttgagaggagcaatacaggtacttggatgattattttttcactttgccataagaaccattattaggaataatgtccatgagtgttattcatcctcatggacactcaagaataattctgctgtaaatttattttttgttgcccattaacgatgttttaaaacagtaaccattgacaaggcagtgtgggatagtggaaaatatcttgggctgaacttgggagacagtgtagctctggctctggttctgccttggactgggtctgaaaatccagctgctcagcccttggcttgaaagtggtagacgtcactaattgatcacagcactctttctgaccaagggtaaatgcaaccttggaatcctctctaagtggctgttccagagttctgctaccagacagtcttctttgggtgtgaaaaaaggaatgtgcttgacatacaaggtctagatagcctctaagacagggtcccctctaagatggggtattggtccatggcctgttaggaactgagccacacatcaggaggtaagcagtgggagcaagcattactacctgagctctgcctcctgtcagatcagcggctacattagactctcataggagtgcgaaccctattgtgaactgtgcaggcaagggtctaggttgtgtgttccttatgagaatctaatgcctgatgatctgaagtggaacagtttcatcctgaaaccatccctctcccccaggtccatggaaaaattgtcttccacgaaaccagtccctggtgccaaaaaggttgaggaccactgctctaagttctatttgaacccttaagtcttgctcactaatgagagtgacctatttggtctgttgggtcacttaagtctaggctcttggtcctgccttctgtgatttccttcttagagtttctggaaagatgatcaaagccagggagtgttcagggcccctctgaagaaggtgatgatgagagttgtccaagtcccagggtcttcactaggattttggttcagctatcagactagagagacatcctgattgagagtagtttaaatgggatagaagtttgtttattcttcagatagagtcagggctgacacaggagctactcaatgatcagagacctggcttcttctgtcatgttgctctgccagccttcttttgtgacttttgtctccatagccatggtgggtattgaaactgccactatatttacatttaaactagccagaagaagggacaagaggagggaacgcattttccttttaaaatggtaatacctgatttgcacataccctctcgcatcccattggtgagaaagtggccaaatggccgtatctagagagtctagaaagagcttggtctttattcttgacagctatatatgcactgctagaaattctctgtgcaaagaggagaatgggcattgggaataactagatgcagctatgcctagtgatgtccatgaagttgtggtaaaatcctgaagctaccttgttctttggaaatgttcctcagaatcattaacattagtcatgtgggagacaggagaagaagctctgcagaaaagggaccgagaggacaaggatatagcttgggctggggacaatgtcagagtccaaactctggctatcttggaatagtctgtgtgaacggtgccctcccaagttgtgcagtgcacaacctgtgcagctatatatggcaaccctgcccatccccagtggtttctcactgggaaagcagagtatttcctcagggatgtcattatgtgacaatagtggaaaaagcccaggaaaatctaagaccttctaagactcatgggggcccagagctgggaggaaccaagctgttgctcagttcagaaaacttctctagaaatcccagcctctcctcacacccctccagtgacaggcagacttgcaccaccacaagcaacagccacttttgtggttgggcagttttgtaattaaatatactaatgtgtgtatgtcataaattacattttccaattatgccaaaagagccaaaaatggttttttaatggttagcatataatcgtttttatcaaattgcttgaatctttcatgttaataagagagattcattactatgccacaaaaagcaaatactggcattaattatagaaacaaattaggggggtggagcgcaatggctcatgactgtaatcccagcgctttgggaggctgaggcgggtggatcacaaggtcagaagtttgagaccagcctgaccaacatagtgaaaccccatctctactaaaaatacaaaaattagccaggcatgttggcgtgcacctgtagtcccagctactcaggaggctgaggcaggagaatcgcttgaacccagcaggtggaggttgcagtgagctgagatcgtgccactatactccagcttgggcgacagagtgagacttcatctcaaaaaaaaaaaaaaaaaaaaagtggctcatgcctgtaatcccagcactttgggaggccaaggcgggtggatcacaaggtcaggagatcgagaccatcctggctaacatggtgaaaccccgtctctactaaaaatacaaaaaaaaattagccaggcatggtggcgggtgcctgtagtcccagctactcgggaggctgaggcaggagaatggcgtgaacccaggaggaggagcttgcagtgagccgagatggcaccaccgcactccagcctgggcgacacagcaagactctgaaaaaaaaaaaaaggaaagaaagaaggaaaggaaaggaaagaaaggaaaggaaaggaaggaaagaaagaaagaaaggaaagagagagagagaaagaaagaaagaaagaaagaaagaaagaaagaaagaaagaaagaaagaaagaaagaaagaaagagaaagaaagaaagaaaaagaaaagaaaggagttagggagaaaaaaaccctttctttctttcttttggagatttccggaaaatgtacccttacggatgagagcctgtgtcttcatgggttagagaataaccacgctttgtgcataaaaagttattaagcacaattcctgaattatacataattactagctgtcagtcagttgtgcatttctgtgtatgctggtcttcacttaataagactttatttcacagatcacttggtgtccctacttcactgaaactaggtgattatcttttgaagtctcatttcacataacctaggaggtatatagatttctttaaaaatgtcattgccattattttaaaccttacccatggtatatataaacttacagaaagacagaataggttcattattttaaaccttgcccatggtgtatattagctcacagaaagacatagaataggttcctgccttaagaaaacctgacccacaaaaaagcctgggtttacacaaaagaggaattaagggcggggagcccaccttacaacagaatgaataatagaattttatccaagagcaggcatcctgaggacatttaagacccggatgcatttttccttgttcaagagcacacatccaaaaattgcagtctttctgcgagtcatgatcactctgcacataaagcgtttaggttcagagctcggggaggccattaccatggctgctctctgtctgccctgtgagggtccttggggtggctgcactctggggatggtgctggggctgactgactcacgcggtcgtgtaacacatcagaccttccaaagtcgaacccttgttttgtttcaaggctcaattatgacaggacttggtctcagagcagatcccctccctaggctggagaaggccactttaaaacagatggcctgccccacttcatcatttttatggctctgatctgtgttctccactggcctctggtaaatcaagaatacaagtggacatgaagatctgctttaaaaaataaagaacagaccgggtgcggtggctcatgcctgtaatctcagcatttggaggccgaggtggatggatctcctgaggtcaggagtttgagaccagcctggccaacatggcaaaaccccatctctgctaaaaatataaaaattagctgggcatggtaggcacgtgcctataattccagctactccggaggctgaggcatgagaattgcttgaacccggaaggtggaggctgcagtgagctgagatcatgccacttcactccagcctgggaagcagagcgagactctgtctctaaataaataagtaaatgaattaaattaaataaaaataaagaaccaattaagtcctgtctacaggaaaaggccttacttgctggagaagtagcttgctgtgctggagtagactagtaagttggaacggtgatacagtaccaccttacagagctgctctagggcaccatggggactgtctgagaagcccctggcacactgtaacaggtggcatctggtgtggtgatgatgatgagaatgatgatgaatgtgaaacactctgctctcatttctagaccaagatttacaataaaattatgcacctgtccacctccaacctgtccatgggagaaatgactgctggacagatctgtaatctggttgccatcgacaccaatcagctcatgtggtttttcttcttgtgcccaaacctctgggctatgccagtacaggtactagatgggctgaggggaagggaggggggcagcaggacacacaaccagaatctgctggtccatggccagtaactaggagcacaccgtcttccactccatgcttgcctgtacctttcacacacttggctataccacaggctgtacctctgggtccctcctgtcccatactctgcaagcactgaccatctctcttaatgaccagagaaggcagtatcattaagactttaaaaatggagccaactttataaactatagaaaaatcaagccaggttcaggggctcacacctgtaatcccagcactttgggaggctgaggcaggaagattacatgagcacaggagttcaagactggcctgggcaacacagtgagaccccttctatgcagaaaaaaaaaagaagaaagaaaagaaaaatcgtacatggaatgcccacagatcttaaaagctatgttgtagcaaaatatttaattacatcaaaaagtgttagtgatgtatttttaagcaaaaagagtaagttacaaatagtatatgttgtatgcttactactaaactggaatatatgttatgtatacatttgtacagattcacacatgaaaaagaattggaaaatcacatagtgggattataagtgatttttattttctttatgtgtttctaaattctctaataagcgtgtataagatttggaaatcaacaacatgatacttttagcctaggcaacaaagtgagaccctgtctgtacaaaaaattagctggaagtggtggctcacaactatagccccagctactcagaggctgaggtgggaagattacctaaagtccaggaggcagaggttgcagtgagctacaatcacaccactgcactccagcctgggcgatagagtgacaccttgtctcaaaaacaaacaaaacctggtgttttttagccagatgtggtggtgcgcccctttagtcccagctacctgggagtctgagatggaaggattgcttgaccccaggagttcaaggctgcagtgagcaatgatcacgcccctgcacttcagcctggacaacagagagactcctgtctcttaaaaaataaaaataaaaacgttaaaacatggtatttttttaaagcaagacaacctttggtgctggctcaggaagaggtacattaccccccaataatcagaggagaatcgtcagcatgattgatctgacctcgggcttcatgtgtcccatctcccacccggagctcttccaccacagagtctgatcctgtcctatgcctgggactaaatcttcaccctggtgttcaggccagaaaccgaaatcccagacccattcccagagggcgggaaggttccaccgggagagcttgatgtagcagaaagtgacttgggtgagacaggctgattcaaatacttaacctctctgagccttggtttctttatctatgaaatggggaggctgcccaccctctggagttgctatggcaattcagttagataatgtaagtaacacagcaggcagagtggcccccagagtcttcacttcgtaaatatcagatccctctaccttgcacatgtttggtatgagtgaggtgttaccaatccagaatccattgcttcttgggataaagattccataaaccttcatctccagtgatttgtattggtcctccttacttgtaaagcttagagtttaaaaatattaaaagaaaaaaaggggagaggctcccacagggacacagctagacaagatgagatgcagggaatctgatgttcttttttatgggaacagtcatatatgccatcccccattaccacctacccatgcccagactgcccccgctccattctgccaagacagatcaatgactataaaagctacaaaagggcctggagatctcatctagtttagttaccaaccaaccttttatgcacaagactttctaagctgggtgtggtggctcatgcctgtagtctcagccactcaaaaggctgaggtaggaggatggcttgagcccaagagttcgagtccagcctgggcaacatagagagacctcatctctaacacaattttttttttgaaacatgaaaaatgaagatttctgaccatgcttctctcattagttaacactttgggctgtgagggtctgatgcagagagacacagcctgggaggatcctaacatgtacacagcattcaaaaggctacaagacactttctgttgtgtccccttgaacaagcagtttgtaagattttgttggccaggcatggtggctcgctcctgtaatcccagcactttgggaggctgaggctgatggttcacctgaggtcaggagttcgagaccagcctgaccaatatggtgaaaccccgtctctactaaaaatacaaaaattagccgggcatgatggcgtgtgcctgtagtctcagctactccggaggctgagacaggagaattgcttgagcccaggaggcggagactgtggtgagctgagatcgtgtcactgcgttccagcctgggtaacagagcgagactcggtctaaaaaaaaaaaaaaaaaagaaatcaggttttgtctactaaacctgctgcacggttaccgttactagtactcacagggtttgttgcacatgcatcgttgctaatagtgctaactaatattaacagcccttgccctatgcctggccctgtcccagcccccctcccttgtataatttaacccttgcactgggggtagagattttcatatctactgatttcttacctttgctcatttatcatggagtgtcctttggttttctgtgtttgtatatacctttaccacttatagatttgaccagcactcaagaaccagtgttactcctgggagttaatacaatcccagccccatggcaaagaaactcatgtggttaggattctgtgtgcagcctggttagccacagggcacgtaaggctttttataatattgacatgagtgcagaagccccattcccgtgtaagccctgagggctcttgtttcataatctttttttggtcacatgcacacagctttattgagatataacccactcatttaaagcatacaaatcagtgggttttagtgtcctatattcacagagctgtgcagccatcatcacaaatgtggaagttttcatttccccaaaaagaaacccgtacccattggcagtcactcctcatcttcgcccccagcccttggccaccgtttatctacacatacttttgaaaggctagtgaaactttctcagaaaaataaatgcttgctcaaacatttgggctataatttcaggggcttcatgggtgcccccctgacatttatcaagaacaccaggttaaggaatttagctataatggaggcctctgtgtttcccagtctcctgggtatcagaggcccagagagggcaggtgccttaccctgggccacgcagtgaaccagtggcagcaccatactcacacatctcctttctgcggttccccagtgacagagttctcaggaagctttttcatttattttctgagaggagggtaggccatcttgtattgatctccaactatatgccagccacaattctaggtgcttatcataaaggttcatttaatcttcacaatagtcctgcagagtggacagagtccttcagagtgggcattataatcaccattttaaagatggagaagctgaaaaccagagaggttaagtaactcacccaagactgcacagcaaaaggctggggctttgaaactcagggccacagactccaaagactatgtcctccccactatgctagatttttttcctaacctgtgaataggagacaaaatagtccttttatttctcacagttgctttgcacactcagaatccatgatttcttctgcatgagggccattcagacctgtgcagaagagagtaatggaccaaggagtcttgggagcacctaggaggaggggatgggggagcatgaggaggagccagggaacagcagcagctgcagcaccagctcccaccccagcctctgccagtctcttggaggtggtgtgggtgcagacaccggctcacaaggtgccctgttagtgagcttggggtgccatgggagccttcttgttgtcaggcccaacccaagctggctgaagaacaccctgatggcctccatttgagcacaactaatgaaggactggatgccagagataagtccaggagggtgatgctgcagggcaggccagggaagagggtacttcatctctatcatggtcctctgcccatccatgccagcatctaacacctgttaaacactgggaggcaggtggtgaaggggccacttcccagcctctaagatacctcctaagccaggaggcattctgtgattaaattacagggcctcccacttactcctttatccttgaggcggtgctggaagcttaatgccaatctggtgtagggctctgggactacaggaccaaggcaagcagtcctttctctctctctctctctttttagctaaggaagccagcacatctgttctttgagaaaaagccctgtatttagaggtgtctgcctttgaaggcaacctgagaaactgtcatcttggcgctttggggactggccatttacacttctcataaatattcagaagtaggcagtcatttacataaagctaaatgcagaaggaattctcttttcagggaatacctggcagattcattaaaaaaattaaagaaaccaagagcataagaatgaaaagcgaattctcggaccccaggctggttttttctggcatgggtgcagtaactttgcctctttgctcagttatcacttttttccaatgacagtaaccataagccctgagagccagcaaatagaacaaaaggtgctgtcacaaacattgtgcaatctcatctctgagatttccatctggaaaatagactggagagagttaaggcttcaaccagccttgcagataaatgcagttagttaccagcccagcaaccctctgcttgcatgagagcccattatgctaacctccttttgaaattgctttgtttctcctccttccctgcactccactccccaagataatttggaaacctgggcaccaaggcttgtcccactctaggggactggggaaacagggattttgccagcacctcctggcagggcaaccatcaggtcaaagggacctgacccatgaccccttcctcagatcattgtgggtgtgattctcctctactacatactcggagtcagtgccttaattggagcagctgtcatcattctactggctcctgtccagtacttcgtggccaccaagctgtctcaggcccagcggagcacactggtgagtgcccaaaggtgtgtgtgttttgtccctcttcccctccttccctcgacagcagcaggtctcctcccacacacccacactgtcattgactttgactttgactttgagtaggccacttcacctgtccaggcctcagcttctttgtctgggaaatggagtcaatgggggaggaggctgcctcccggtgaggacaggaggcgggcatggcagtgacagtattgacactcaggccttcctctcgggtgggagacggagcagaagcctctcccctctgactcggggacccctgcaggagtattccaatgagcggctgaagcagaccaacgagatgctccgcggcatcaagctgctgaagctgtacgcctgggagaacatcttccgcacgcgggtggagacgacccgcaggaaggagatgaccagcctcagggcctttgccatctatacctccatctccagtgagttcaccccacacagccagccctgggtgctgctgcgtacatgcaaggagagggtgtcagagctcgggtaagagggggtgcagggacagaagcaggaggccttgagattatccgactcagtaggggagcctcaaactggctctgatagctaagctcccagaaatcaaagtactcttcattcatttatccaacaaacatgcatggaaagcctgctatgtgctggacactgtgctggccctcaggatacagtgatgaggaagagagatgaagtttcattcctcatggaactgatatgttattgacagacagcagcaagtaagtaaatgaccacagttttgaactctcctaagaatgaagactttttagtaagtcagactgagctgtcattgccctggggaagctacaagaaagcttccatccacttggggctatgcaaaagaaaaagactagttatccttaaatatcagaagcccaggctgaaggtactcacaggtgtagggactgaatttatattaaccaagtagtttgggaaccccaagccaaggaagaagaaaaagaccaaaactggtaaaagtcctagagtcccatatacttgaaaccattttactgagaatgtaaaacttttttttctttttttgagatggagtctcgctctgtcacccaggctggagtgcagtggcaaaatctcggctcactgcaacctccacatcccaggttcaagtgattctcctgcctcagcctcccatgtagctgggactacaggcacacaccaccacacccgactaatttttgtatttttagtagagacagagtttcaccatattggccaggctagtcttgaactcctgacctcgtgatccacccgcctcagcctcccaaagtgctggaattacatgcatgagccactgtgcccagcccaaaagattttttagaaattgaaattttagttatggaaattaattcagtgaacaatggtcccctggtcagagtgagggcttacggaggtcaggtgatccatggagtcctggcccaagtttatctcacagttggtctcgtggctccgtggacccatcccatggtggttacttcccaagtgcataattgggatgtagatatttagcaaccagctgacttcacactagttccctgacctgtccagtctaagagtcattatggccaagtggaagcccctggaaagaagaaaacaaaaaagaaaccaaaacttactcagtgcacaggttacatgaatgagtatagctgaagagagaatttttgaattagaagacagatgagtggggattacacagaacgtggcaaggagagtaagttggtagaaccattttacagatgggaaattaaggccagaggggagtgtgttcctgagatccctcctgaggttagtagcatggctcggactagatcctccaaagtctcttaactcctggtctcaggctattttccacaaagagctgggggcctctgtggggtgaagaagacttaggacaccatggggcaccattatgaggccatttcctcctaggagaaaaaaaatctctgggctctgaaaggagtagaattagggtaggaaattaagagaggctaccgaccacctcctccaactaaaattggttcttttggtgccaggaagagacacacctggtgggggagggaaggtggtaatggagggggtgctggtagtgtctcccagatagacccatccaacaagtctcatggagaatgagacggtcactcaggtcatctgcgtattcttggcattcttgctgcctagagagagagtctgatggagctaggtggccaccaagctgtcccactccccaagacagtttggaaacatgggcaccaaggcatgtccctgtctaggggactggggaaatatcccatagcagtgttctcacagtatggggctggccatgaataccccaggagtccaacctccctttgtccagctagaccatggtgtcctatgcctcaggcagggaatgtggtccagtcatcagtggctgggccgtctgccatacatggtgcaagccatggcgttttatgcagaaagtcctgctagcatttgattttctcagaatggagctgtgagcatggcaggcaaccactgtttcctggattcttcaccaagacaccccaagttcctggtctctccccgttatcctcatccctgaccctgtggttctcagagcctccaaacacactcaggctaagcactccatagacaggggaaatttggaaggaacatctagggagctcagaaaagccaatgtccctagccccaggcccacttcaaccttctctctgtcagtcctgcctgcccctggaggctggttacatgaagagtaaccccctgcttgtgtatagccccccagttttgtacaggtttagagacagttcccagcagtaggaacagctgccgaggtgggagagggcttctcccgatagccgggggacttcctctcccaggaacaacagggtggggtagagcaggcttgtcgttgctgagatagagagagggaagggaaacaacaaggaaagtgggggcactgggtccccaaggttcctggcacagcaagcagtgaagttggggcagcctcaggtcatgtagtgggggcaggtgacatctgctttgactgctcctaagagatatgtactcatctcctggattccaaactgcagcctgggacatgttttcttatataaacagcatcaaaagatgtgtgagttcccaggctagcccactgaaccctacctagtgggtgctcattgtcccccagagcccccagaagacaagccgtggctttgtgatgggcctggggccaggaggacctagggatatgttgtgaagagctgagaagactctggaaaaaaggggctctggagccaagcaggagcccgcccaggactcctcacgtgtccaagtcacctagggagagaaacagagcagcccaggttggtccctggaagagagcagcggaggaggggaaaggggagagcccctggggagagctttgaaagtcaagtgctgtttgctcagtgtgtttgcctttccgaggatgtgtttttttttccctccgttagtcagcagtgggagggggagagagacgggtggtagggtgcagggtacctcctggctgcaggcatatgctttgagtgcgtgttcatttacctcctctggacttcctgccttctgttaccagggatcaagacacaggtcattaggcgtgaggtaatggggcatctcttgttctgacccctggcgccagtcttggagtcctgacgctgcagaggagccccagagtcacatttcctgttggggcccatcctgctcatatgcggcaccatcagacttctgggcaggcaagattacctgtgactctgtctgatggtctcgccatcaatatcactgagagtagctgtgtatggagtcccgaactggtacaggataaaacagggggctgaaaagggaatgaatgggcacagtttctctggcatcaaaagtcacatccagaattgatatttcctgttgagtaaaaatagaaatataagttgctcagtggatgttgagtgagccctattcatgtgccccactctgtgccaagcaccaggaaggagggaagggaaaaatgataagatgttctccccgttctccaggagtttatgctccactaagaagtcagagctaacatgcacagaacagtgtggcagcgagagcagaaccgtgtggccagctccatgcttgccgcctagcaagcgtgattgcacttcatcctcataacaacttggtgaggtgtgttgctctgttgtcccattttacagcagagaggactgactctcagtgaattgaaatgtctcagtgaggtcttccacagcaaaaggcgaagcacagagaaggaagtccatgtgggctgggagttcacccagagattcatgtaggggcaatgtgggctgtaccttgcaagatggtgggatttcaatgaggagaagacaaagtgggaggaagctggagacaaggactgtggtctcttcctttagaagtcagttcaatctttttttccttgtggaagcagcataactctaggtggttcctctgtatctgaggacaagctttgtagaggtgacaaaggggtcctaggtcctatcaggcaagcactcgatatgctgccagttcattctgtccattgtgagatacccattccagagcgcttcctctgtgccaggctctacggaggttctggatgttaaagaggaagcaggcatggccctggccctcccagtcttgtgggagattgatcatgcccatgaatagtgaccatgtggtcagagccacagggtcaattccaaatgcccctgtttctcttttgtgttactcacctgactctgggtctttcgtttcttccattcattttttttaaacaaatatttcctgcccaccttctgtgtgccaggcctggggatgcagtgggagaagcctctgtcctcctcagtggaggcgctaactcagaacaggcagtggagaaaaacaacatgacctggagacctggtgccccttccttccccagcatctttgaaattcttttggttgttgttgttttgagatggagtctcactctgttgtcaggctggagtgcagtggcgcgatctcaactcactgcaacctctgcctcccaggttcaagtaattctccctgcctcagcctcccaagtagctgggattacaggtgctctctaccatgcccagtaatattttttgtatttttagtagagacagggtttcgccatgttggccagcctggtctcaaactcctgacctcaggtgatccacctgccttggcctcccaaaatgctgggattacaagcatgagccactgtgcctggcctgaaattcttcaatatctacctgcccttctgccagttggtgcagccacagtgggctgcttatgcatatcctggcctggcttggtggggagcatggctgagggagagccggggcacccatcaattaaggaggtaaagatcagtctgactgagatgcctcctgccacacttcctcagctgccagcaactgacaccattaacctgatttccttccccctctgttgactgcactgactattggactgaatgggaaacagccccgtgcacctcaaaatgcacttcccctcctgcagatgcatcttgcaattaggcccaaactgtgagcctgcatgctcctcccctggccctgcacaggcaacaaagctgaagttaatcagaggtacaaatggctggctatgcctctctgacacgtaacttctggaacatgtatcaatgctttggaaatgaaaagctcctggtattgcaatgccaggctggtgcccataagggccagaaaacattccttgggcaaagccagggggagtgggtgatctgatcccagctcaggtttgttgatttgttgttttgtttgtttcgttttgtatggggcaagggttgagggtatgaaaaacttacactatcatttactaccgtagtccccagaacccagcacaccagcacaaggcctggaacagggataccttttttgaatgaataagtctttttttttttttttttttttttttttgagacagagtttcactcttgttgcccaggctggagtgcagtggcgcgatctcggctcactgcaacctccgcctcctgggttcaagcgattctcctgcctcagcctctcgagtagctaggattacaggtatgcgccaccacgcctggctaatattttggtatttttagtagagatggggtttcaccatgttggccaggctggtctcaaactcctgacctcaggtgatccacccaccttggcctcccagagtgctgggattacaggcgtgagccactgtgcccagccttgaatggataagtcttaagggatatttttggaaaggatattctaaaaaatacccatgtctctacactattgcagaagggctttcagttttgatggcagcctttcaggccagcctacacgcaactaaacttttccataacagcatcacacttacacaagaagaaggttttataatccacttgccattatttaacatagttcttcctccttaactttcaagatctgagcactataatgttcttctttttgtttttgtttttttctaaatcaaattaaggtgagtcacctcaccttgggcctgagttggacagaaatctattcttggctatattccccacccctccaccaccttggaaccttatagaactttatgtggttcaggaaaatgagggcgaggcctcagatcttcaacccatgacagctgtatgcccagctccctgccttcctgtcttacccccagctagggcacaggactgactattgtgcccagagaggtgccagagcctgtaacaaccccagacttcccaggtccagccacatccaccccagagccccaaaagatgatcttcagagagacctttaaaacacaagtagctggtcacttccatccagaccagaacccaagatggctgtgctcttgctgagacatgttggttgtcattgcctccgagcccactttagccctcagctctgtaccagaaatgctgttcctttgggaatcacagccaaagaagagatggagcagttctggaataagaacacaagttcaaactgtcccatatctccccacatcactatctacagttggtctcttcccatggcgatgtccatctgccaccgtggcactggtattgctttgagtgcaggggtctctctttttggcatgttggccctgttactccctgggaactttgagtcttatttggaatgcgtgaagtccctgtgtccggggccagcactgatccacacagctaagtttgcactcatcttccctctcatgtatcatatctggaatggggtctgacacttgatgtgggacctaggaaaaggcctgaagattccccagctataccaatctggagtggttgtcccggttcttactgtactgtcctctgtagggctggcagccatgtgaagaacagaggttcccagcatcatcttcctacacattattacattcacccatctttctgtttctcacttttatctccagcctgggaaaagttctccttatttgtttaaatccttttgtgcttttagatccccttggagcagtagagtaccttgtagaccataagagtggaaaagggtctagttttctccttgtttctaaagatggggtggctgaaaaaactccccttttttgcctacagcttgcctctctgggcctagaagtggttattctgtctccatattggcctttgatttgtgctgagggtcagcttttggctccttcttcctgagacagtggaaacaatgccagctgtgtggcttctgccctgggggctgggggtgaggctttgggtgccactgcctgtgggttgctggcttaaaggacaattctgttcattggtgagagcccaggccattaacacctacgcagtgttattgaaagaagagaggcgggggtggaggggaattagtctatcccagctagagggagataaagagggctagttagttcttggagcagctgctttgaggagaaaatgtatagcttttgacacaacaggaagatccagaaaattatcattgaacatattaaaggttatttctttttcttgcaaaacacacacacacacacacacacacacacacacacgcgaacacacgcagctgatgattctactctcccagccccagccctgaaggggacccagaactccctgcacaaaggctgtccttcaaggggagggtgaaagaagtggaaaatcacattttcattctttagcgtctccatacaacagccagaactgggcagaagctaattatatcagaagcatactccatgttgctgcatcagctttgggatgttcatttttaaatttatttatagcttgtctcattcctcaaaggagttcagggagctacaaaaataaagacaataaaattgaaaaaaattaaattaaaaaaaccatgaccagggaaaatgtgcagtagaatgaagtgtcaattatcacgttttctgactgcaaaatctcccccacggctgatgcaccatcatttactacaacagcccctcttgttggacatttccagtttatttcgtttgggatggtttgttgctgttgctgtggttgtggttttgttttattgaattttgtgttagctgcagctaataccatcttgctgatggctttgcgctgctcttgaatgattactcaggataaatttcctggagacggattataggatcagaaggtctgaacttctgtgtggctctagctacaaagcaccagattgctttccaagagcgttgtagcaatttataatccaacactcagcctattttttggctgggagtcaagccccagaatgtgaaggaggggtcttggcctggagcaggggctgagggatgggtgcacaggacccctccttattggttatttatggggatgggccaggaggagcagaatagaggcccctgccctcccagttgctccttggagtgactgaccccataggggaggggcgaggctacctcacatttagaactatgtagttggtgatggtcaaggtcctaggtctgatgggcatcctcctccctctcctcctcagccagtaatggctgcactatgtcgtatgtcctagatctgggtcccttttgctgtgggaacaccaataatacttacgctgtttcctgccggaaacggtgcaggagggctgtggcatggtagtgggccctggaaaccatctagccttcatgaggaagggcagttaaagcacaggcatgtatgatgttggtattgattaaaagcctcacgggcagagaaattcgccatctgccagggccccagccatacgagggctccagccatacatcctccaggagactgggacctctccaattgcaggagccttgccttccccatcagattaggaattccccgaggatggggacaatgtccttcccacctgcttgagaactcctaaggggcatgtactctgtctccccattgtatctggaacttcctgggagcatagctcctgtctccgtcctcagactgggaatcccctaagggcagaggccatgtccttccacccacttgggattccctgaagttggggaccacatctctgatgtacaatgctttgtatgtactgactgctgcaggattcttggagtaaatgggcagtcaacttcttggactggtattgaccatctggacttcatcagagtgtccaagactttgccattcattagacaggggccatgtgcacaggcagagccctggcctctggcttctggctcctgactcctggtccctctgctttaatttggctaatggcagaaccagactcctttctgggctgccctggaaggggatccttgaatgaaagaggatagatgggaaggtggcagctgacatggttacctcttatgccatgggggggctgctctctctggaaatttaggcctggggtcagggcactgttgagcattttacaccctaggccagaggaggggtgacctgtggagcagggctaagctagtagcccatgaggtatgatgtgtaggcagcacctggggctcacagagcctgttacccatgttatctcctctgaccttggaaagagctggggtgtatgaacaagtatttataagtttacaaaaatcatatgaggaaactgaggcacggggaaggtaaatgacatgccctaggttacacagcttataagtagcagggattctgcccttctgtcacaccaagtcccactgtcttttcttcctggagtccctgtgactgatctaaaggccacatgtttaacagaataaggaggaggcctctgttgcagcaaaccagctaccccacccgcacacagactctaagggacatcctgctttaagctgtccttagttactaatacctcagtgagaatgagtttgaaattttctcaagagccatgggagactaggaagtctctaagcttcatagagagcctggcttggggggacacaggagccaaaggcagaggaagaagtggcagctttgtgcccccagaaacacgtgctcctgacctcacagttggccacagccagccaactctcccatccttctcccaccactttcccgtggggctaacttcaccctgtccacacggagtgacttaacagtttaagccccagagtcgggggccggggtacctgggacaagagtcctgagggaaatggggtgaggaactggaagtgccacagggctagagttctgcccctagcctactggagctgtgccccacaggctggccccactggactgcgctgcctccaagccatcctgggcatctccatgtgtagctgtcacgctcctcccactaaacgcctccctgtgcttcctctgcagttttcatgaacacggccatccccattgcagctgtcctcatagtaagtggatcctttctccatctcttgggggtagggtggagggggagggcgtctgcagtgacaggctgcccagatttggcctttctgcacaggggcctcagaagacaggctccacagccagactgaaaataggatcgaaagtttatagagggtgtggcccctccccaactccagccgaacaggggcctctgcctccaggcctggaagaccggaggcttagtatttagagaaattaaactttcttttaaaaaatagctatccaaatttttaatttttaaagtgaaacatgtgtattgtagaagtgatgggaaatccagaacagaaagctcaaagagaattaaaatcacccataatcccactggtaacatttttaatgtgtttctttccagtctttttttaaggcctatgatatgtcattttctacaaaaataggaatgtgctatgcatgcagttttgcaacctgctcttttaaatttaggaatatgccacacacaattctccatgccactgaatattatgatggtggctttctaaagcaattttgataaaagctgtgtgtgagctgagccatgggggtcaagcagcatgctcctacagaaaggcctgggcccctacgagcctgcagccccctcacccagcctcccatccccatcttctgtgatggctgcagttccttaaaaagatctgcttatttcccccggggccagtgtccctgagctgtgtagagttcacagcctgtcggatacacttgggaattcacttccaatgtgatgtattgagctggttcctggcctggctcctgggggaactgtgggtaacagaggccactgagccagccaggtggctggggcaaagcactgtgcagtttcgtaatcactctgtttacgttatcccgatgaggactggggagatgagcaccccgcctgctgtctgcagagggggccgtgctgacctaacccgagatctcctccctgcttattcccagccaagactgggcaggacagggagtcttggccaggacagggagggagcagcccctgctctccagcttgaagtcctgaacttgttggggacgtttccatgagatgactgtggggatgatgaaggtgtctccaactaaaagatcctcttaggagcctgctccctgacagccctctcatttcccttccagtgctgagcgtttccagtgtgggagggacccacaccctgggccaccctggcctcacttgtgcctctgtccacagactttcgtgggccacgtcagcttcttcaaagaggccgacttctcgccctccgtggcctttgcctccctctccctcttccatatcttggtcacaccgctgttcctgctgtccagtgtggtccgatctaccgtcaaagctctagtgaggtgaggggagggtccgggcgagggcactgggcaggcaggtcctgtgtcagcctcaaggcttgctcgagtgatggccaaaccacagctgtttggtcccggaacacacccccattgctgggccttgctgtagctggtcctggttggtcagagggacattggcctgtat

SEQ ID NO: 15310 - DNA, 83909 bp, Homo sapiens
agctgagcccgagcccagcccgcgcccgcgccgccatgcccctggccttctgcggcagcgagaaccactcggccgcctaccgggtggaccagggggtcctcaacaacggctgctttgtggacgcgctcaacgtggtgccgcacgtcttcctactcttcatcaccttccccatcctcttcattggtgagtgcgcgcagcgagccgcggaggaggggacgggagagcagggagggaggaggaggcgctgcgcgccgcaccgctcggcgtccccttccggcccgcgaccgccgtccgcctcgttcccggggtcccctgccctgtgtcctgcccgccggtccccgcactcgcacaccagctcatcccttcactcccccggtgcccccgatcccgcgccaaacacagcggacgtttgtgacccatgggatcaccaagttttgcttctgcagggccaagagctgggatggggaaaagggaaagaggaggtctcagcacgcagtgggaaactggagaggggtcgggcctcaccctccgtggcgcagcttagggagccgggtcacccctcccgcaaggcagcctccctgtcagccgcagctgggcctagggaagagggaagcctgtgctttggagtctgggatggaggcccagctaacccctatgctttcaccgggctgagccgcgcagtggtccgtgatctctgacagtcccaggcccgcgccctgggcgaggagaggcgagagctagggacttggattcccttcccccgccaccccacccgggcatgtgtctccagagcgcaacttctcaggctctgcgcaaagtagctccgactcgccgacgcagcgaccccggcgcccttgcttgcaaagttgggcgccacggccgggacaatcgtgcgtgcctctccactgaggtcccccccatctctctccaagaccttgactcttccagaccagtcaagtctatcaactcatagggtgtcccctgcatccccaaaacgtgttcattcactttaagaaaacaagcaaatcttaaaattcatatacagctttggggaagaaaggaaagattgtcacaaaattagatttacaagaggttgctgcagaagcagagttgctagttattaacaaagacagttagatagaaatagaaataaaacatacaaaatatgtgctcatatgtgcatcaaaaatcaaaaaagaacagcatttacacttctgttctcagccaaacggtttattaacctgatgacttgtcacacaagaagttagtatgtataatggggtaccttggcagggcacagtggcttacatctgtaatctcagcattttggtgggctgtgacaggaagactgcttgagtccaggagttcgagaccagcctgggcaacatagtgagaccccccccgccctttctacaaaaaattaaaaattagctgagcatggtgatgtgcgcctgtagtcccagctactcaggaggctgaggcgggaggatcacttgagcctaggagatcaaggctgtagtgagccgtgatcgtggcactgcactccagcagaggcaacagagcaagaccctgtctcagtaaaaaggtgtggtgggggaggtaccagcataggaccaggctgaatgagttggacgtttagtttgtgtgtaccagccttggggatcctcatgtgtaggtgtcaccctcaccatggacccaatgcccaagcacctttctggggttcatgcaccctcttcctcctccaagtgggcaggcatcctgcctctgactgtctctccctgcaggatggggaagtcagagctccaaggtgcacatccaccacagcacatggcttcatttccctgggcacaacctgcggtggatcctgaccttcatgctgctcttcgtcctggtgtgtgagattgcagagggcatcctgtctgatgggtgagtgactgtctgaggactcaggaaagtgaatctgctccagggtacttcctgaaaggcccaaggagatcctagctcacctatattccacaagcccatgtcttttgttactacatccagcagctcagtgtcttctatgtgccaacctctctgagctgggcactggacgcaagtgagtcccaggccctgccatcagtccaggagagcagagggaacacggacctgcatgccaagtcccagtgaaataatgctagagcctattagaatgccacaactccagtgaaaaatgtctggcctcttctacaacctgccggagttaccttcttggaaaaaaaaaaaaatctaaccatgccacccactcttgcataagacctttccttggttctcagctgttttgaagatgtggtctcagatcctcagcccaccattcaaggtcttcacagtcagccccacctatctctggcctcattccccatgcccaccttccgtttgggcctcacagcacactcctcacacctctgctacagcacagatcacactgtatgttaaagtttatgtctatttgcaaaactgtcttcagagtcagaaaggcctaagagttagaatctgagtcttgttcatctttgtgttcacagtgcaaggcatgtgataaacataaacattattcagtccataaacatttattgggtccttaggagaatgaatgaaaccatgttacaaataagtactctgggaggtgagaggaaggcagaattgggcaagctccatggttgagagggctttggagcggagtctggaagggtgactaggcttcagacacacagaggaggaaggagagagagaactggtggtgcctgagggaagggaaaaggcaccaaagagaaaagcaggtagggctagggagcagcgcaggggctggagcattaaacacaggctggggagcgatggaggctgaggctgggaacccaggttggggcatctcaggaggactgtgaatcccagcctgcatgtttgggtcggatttggtcagcagtttggaacagaagagagatgtcatcagcataacacttttaggtgggaacctgaggtgttcagcgcaggctggaggcagggagaatctagaggtataatagaagcaggacttagcattgactgcagtagtctaggtgagcaataactgcagacagaaatggtgtgtcagcagtcagggacagaagaggagcgggagcagccatctcactaaggaagaatccagtaaccagcaaggatgagagactgccaggagagggagtggtggaggagagggatatttggcttgagtatctgaggtccagcgccccctgagctggaatcagattatacccagactgcactcctgcagtgctgcctggctcctgtagttggatggcaggggataggctccctcatcctccctcccgttccccaccttcccttccccaatgtccctgcatcctggcttcagcagtgatctctaaaatacctgcttgacttggaggcagcagctctgcctgcttattaaagtccctagaccagcaagaagaccagaaggcatactgctacacaagcacgtgacaagtccgcctccacccccacccctacaccccttccaaagtagcacaaatgccacagtgagccctcagatgggaaatactcaccagatggtgacagagaaagacacctccgcccttggagaaggaagacctgggtcttcagtgagcactgctgctgtgtaccagctatgggactttgcacaagtcattcaggctttctgggcctcataagcatttataaacatacgataaaacattttagttgccaacttaaaaatgtgtgagaaagtataaggtgtttcaaaattatttcaaggagtaaagaggcaagagttttgaagatccctgggcagggtgttggctgttcccagtgtggccattcatgactgctctctggccttatgaaacaagcatcatagtccctggcttgcctgcttcatggggctgtggagggtgaaattcgagcatggacagggtgcagagcccggagtggcagagcactgggtagactgtgtattcccagaatgtgggaaactggaatgaatcggtccagggatgccctcctgctggctgtcagcagcccctcctgtgtgtggctgtactgcttcagctcagtgcaaagggccatctcctccccagggcacagatcagctcaagctgagtaattgtcatctggtctttgtgagctcctacccccaggcctgagtgaggggcaggaaaagagcagacaggagaagtcacagacccttgtgatacctccagtctaatccagcctgggttttcagagctgtctggaaatttagggggcaggtgggagggggctgattaaggcagccctgatttgatttagagtgagcctcatttagtgactaattaagccatcttaaacctgtagggcttcccctcttcctttgggtattatttctttctgtgatgttctgaattcagaacaatcaaaacagtataagttagtgaagaagatattttttaataactacaatattttcccagaccaccatacactggataaagcctgtatataaaactttacctaatttcttaactaattgaatgtgtattatttaacaaagcagctaaaaactattctatgaagccatgtcatgaaatatttagttcaattatggttaatcctcatcttatttcgtcttataaaattttaacatttctacctcctattgcaaaaaaaagcatttatatcagcatataataaaacatgtctagatgtcagcttaaaaatgtgtgagagagtagagggtgtttcaaaattatttcaaggagtaaagaggcaagagttttgaagatccccaggaagggtgttggctgtgcccagtgttgccattcatgactgctctctggccttgtctgtcttgtaccttctatattagtttgaagaccttttttggagaatattcactaaagaatatcaatatctaccatttcattaaaaaagaaatgtggagtttgccttttcaagttggtttgatgcttattgatgttttcagggacccagcctcttcccatctttccataccatcctgtgtgtgtgtgtcagcctatcttccccatggtcacaaggtggctgcctagctccgggtattgcttagcatgagcagagagggcatgctgccgacatgcctctcctttatgacagagatcattctttctttgacatctcactggccagaatacgtggaccaacactggcaaaggagtatggaattgcatggctgcttaaaccaatcaccatccattccctggggctgggtatattgctgctggagcaaacctgtggtcctcctggcacagaataaggggaagatactctttggtggacagcccacattgcctctacacttgcacctcagtcccaccagacccactgaggtcacaggatagctctcctcatgtccttcctccttctctgttgaactcttatgtatccttcaaagtccagcctggtgccacctcctctgggaagctgtccttggttgcccaccccctcctttgtgctctctcagtctctgtccatcggcagtatcacttccctagcctgctgactccaacagttagctctgagcatggcagccccctccataccatcagcttctcaagggcagggacccttggcacactggatagaagtagcctggtgggcaacagcagcactgaggcagcaagctgtagcaggccatctgggaatggagtgggtaccacagggctggagcagaaagggcaggctgggcagatctgataaagtggctggaggccacatagcctgggcctttcgttccaggctgagcagagtgggttttgctgtctgcaggagggagctgtggaagggcatgatcacgaccaactaaggtgaccctcctcaccaggcccagggaagactgaggcctggaaggaggctctggctgcctctgggtcttacccccaggccacagtccacccacttagaggcctctgtgagttaaggtggagagactatgagctggtattgactgctccattccccatcccgagagaggagacaaaatcagtgaccttggaaatgcctcttcgtgcctcagtttcctcaccccataaaatgggagactaagagtacccactcgatggggtttaatgaagattaaatgggttaacatatatcgcatgcttagaacagtgcctggcacagagtaaatgctccataaatactgactctcatcagtttgttatcacagcctctggggagggcgccagtgctgacttatgctgttcgtgttaaatggggctgtcactgggtgagttgtggcatacaggcccctgcactgttcaagagaccccagcaacccttgtgcttagggctcagcacatagtaaggcctccagatcatatacccagctctactccatgtactggcagctctgcccagcccataccccaaatacgcccattaactaaagggccctgcagcctataaagtgatgctataaaggttcagtgttcagcctttgaaattcaaggcctgggctgctctattgcagtacttagcatgtccccatcctgtctgtttctctctcccatctcagggtgaccgaatcccaccatctgcacctgtacatgccagccgggatggcgttcatggctgctgtcacctccgtggtctactatcacaacatcgagacttccaacttccccaagctgctaattggtaggtgaggtgtaggagggaggggcagtaccttcattcatttcttcagataatgtttactgaggactcattatgtgccagctattgctctaaacagtagagatttggaatagaaaaagaaaaaaatccctgccttcatggagcttacagtctggtgaaggaggatagacaggcaaagacagtgaataaacaagcaaacaaataggtggtggggatgctatgaagaaaatcaagctgagtaaggggtaggggcaatgacaatgttgctatctacacaggatggtcagggaagggctgtggtaactgtgggcatgcagatatttgggggaaggtattccctgcaaggggagtgacaagtgcaaagtcctctgatagggatagatttggcaaagatgtcactgtgggcaaagccaaatgagcaaggggaagagtgggaggtgagggcaggcgtcaggagaggagcgagcaagagtcccaggctctgggcctgagagcctgggtgaactgtggcatcaataactgatgtgacagaggagggggaggtgggctgtggtggggataaagttttctactgggggcatatcgagtttgagatgtcacagagacagccaactcaagtgtcaagttgggctttcatggggaggtcaggacaggagctacactttcaggaggtgggccttgtagatgacatctaaagcttgagcctggggctggctgccgtggctcacacctgtaaccccagcactttgggaggccgaggtgggcggatcacccgaggtcaggagtttgagaccagcctgaccaacatggagaaacccccacctctactaaaaatagaaaaattagctgggcatggtggcacgcatcggtggtcccaggtactcaggaggctgaggcagtcaaatctcttgaacccaggaggtggagattgtagtgagctgagatcgcgccactgcagtccagcctgggtgacagagcaagactccatctagaaggaaggaaggaaggaaggaaggagggagggagggaagggagggagggaggagggagggagaagaaagcttgagcctggatgaggtcacctggggagagaagagaaaggctctgggaccagagcttgaggtttgctaacatttagagagactcgggaaggactgcccacttagagcttctgagatgttaaatactgcaggactggggtcccaggcagaagcaacaggatgatggttggtgtttactgagcatgtgccatggggcaggctccatgccatgttccttacattcattgtcccacaggctaattcccccagcctccttattggtattgttaatatccccattttccagtgtggaccctgaaactgagaggttaaaaataataacagtaaatactcactttgtacttactgtatgccaggccccatcctacctatgtgatatattaattcatttaatccttgcaacaactctatgaggtaggtaccattattattttccctttacatatcagaaaactgaggctcagaggttaaataactggcactagtctagctcgtcaaggggcacagccgggagtctagcatctgtgcaatctcctaatcatttctgagactgcgtgtctaagggccctcagacttcgtccttggggtaaaggtatcaatccgcaggtctgcctctgtgttggggttcagcctgtgtgtctaaggctggggctgtacatctggcagttagactttgttcacactatgtccttaagtcagactgatttttaggtatcacagcatcgaattgacatttggagtctggcacactctgtgctaagccagtgacatcatggtgttgtcagggagtacagggtgtttcttgcactagtcacaggtctgcctttctgtagaaggtgggatctgagctccattaggattatccaggtgatccccctacccctagcccaggggcccccacatgagtatgaatgggagctgggggaagcaggttgagaggggagatgttaaatacaggcttcagagagccaccctgcttccatttctgaagtagctccttgtctgtagagaacccttcattaaccagggcctggctgaccagtgtcctctggaaacaccctgtctggacatctgaggagttcattttctcattctccagcaaacacataatgttctctctttaaagcacaagttatcacccgtggatggatttgtccttttctaaggaacaaagactaactccctccattccccttgttggagttatctccccttgaaaggacactccacagagccagaaattctagaacagggaaaagtggaggggacgtgcctgtgaactgcagggacagaaggaaatgggtattgggagaatggccagccctccaaggggctgatgtctggcctgggtatggagtcccacagaaaggggacctgtgatgcagcttacattgtcccgtgagggaaccatgatcctggaacccagatgaggccaaggaaatgttctctgaaaaagtcatatttgagctgagaactgaaggaactaactgggagaagggaggaaagagtgcttcaggcagaggaaacagcatgtgcaaaggccccaaggcagaaggaacaaaacacattagaaaattcagaagaagaagagtggcgtgggtgcaaagtggaggggagctggactttgggttttgtttgcttgtgcccaggctggagtgcagtggcaccaccttgggtcactacaacctccgcttcctgggttcaagcggattcttgtgcctcagcctgctgagtagctgggaatacaggcgtgtaccaccacactcagataattttttgtatttttagaagagttgggatttcaccctgttgaccatgctggtcttgaactcctggccttaagtgatcaggtctcaacttcccaaagtgttgggattacagccgtgagccaccgcacccacctggaaggtcataccacagatgtttgcctttatcccaacagcaatgggaagttgtgtgtgtgtgtgtgtgtgtgtgtgtgtgtgtgtgtgtgtgtggtttaacatgtttaacataaaatttatcatcttaactgtttttaagtatagtgttctgtggcattaagtatattcacagccgggcatggtggctcatgcctgtaatcccagcaccttggcaggccaaggcaggtgaattgcttgagctcagaagttcgagaccagcctggccaacatgccaaaaccccgtctctacaaaaaacataaaaattagctgggcgtggtaatgtacacctgtagttccagctacttgggaggctgaggtgggagtatcatgggaggctgaggagagaggatcagttgagcctggaaagtggaggctacagtgagccaagattgtgccactgcactccagccaagattgtgccactgcactccagcctggacaacagagtgagaccctgtctcaaaaaaagaaaaaaaaagtatattcacagtgctgtgtagccatcaccactatccatctccagaactttttcatcttcccaggttgaaactctgtactcattaaatgataactccccatttctccctccttacagcccctgacgaccaccattctactttctatctatgaatttgagcactctaggtacctcatctaagcggcatcatgcactgtctttttttttttttttttttttgagatggagtcttgctctgttgcccaggttggagtgcagtggtgcaatctcggctcaccgcaacctctgcttctctggttcaagcgattctcctgcctcagcctcctgagtaactgggactataggtacctgccaccacgcctggctaatttttgtatttttagtagagacggggtttcaccatattggctaggctggtctcaaactcctgatcttgtgatctgcccacctcggcctcccaaagtgctcggattacaggcgagagccaccttgcctggcctatttgtctttttatgacttgcttatttcactgagcataatgtcctcaaggttcatccatgttgtagcatgtattgaaatttccttcctttttaaggctaatattctactgtatggatatgccacattttgtttatctattcgtctgtcagtgggttgcttccacctcttgactcttgtaaatagcactgctatgaacatgggtgcattgaggggttttcgacataatcataataattgctttatggagaccagcttggaggagaacaagatggggaggaagtgtggaaaccaatgagaaggctctcagggtatagcgggaatacagaggacgcatgatgatgcctggacttaggtggtaccacagggatggagagaagtagatagagtcaagctatttaggacgtgaaatagacagcatttgttaatgggagaggtgtggggcgagggagaagaatagagggagaaggaggagtaatgggagctcaccagcagcccccatgttatgcctctttccttccttttccctcttctctcatcaggcattcagcttttgctgagtacttctgtgtctgacaacaggctgagcactcagcactgcaggacaggactatgcaaaaaacctctgggcctagtcctgggtgcactgctaattccctgtgtgaccttgcacaagacatccaagctctctgagcctcggattccccacctgggcaggaagagtaagtccctgcctaagtcatagggttgtaatgaagagcaaagcagaccatatctgttaagtgttagggacaagacaagcatgaggcatattttcaagtctcggctcctgtaggcagctctcactaagggctaaagggcttctgatgcctgggatagaatctgtccggcagagtggagtggaggcagggggacagccttcagctgtggaattcctccagtcctagagaccagcctgagctgggggacattattccagtcctgaggcatgagagcagaaggccgatgcttctgccctccatcctaatgtcctcctgcagggacccaaggtggatggcatcgatccccccgggtgagctcagccctgggcgcatggtggggcccaacatctcaacctgtttcctaaccctgagccaggcaggacagatcccagatttgtgcccaagagatgctctggcatccatgcccaggcccacatagggatagagggcagggtgaaagtctctctccctcactcgggtcctctggagaggggctctgtgtcatgaagctgaccttatccgcatctggtctaggagggaggagggaaggagctgccagtgctaaaatctcccccaccctcaaagggggacttcacaggttattgctggttttggttgttggaagctgacagtgatttattggcagattgaagtgagtgtgtgtgcgagaatttaggatagaatctactgatagcttctgaggtttaccttccccaggtcttaaatctggagataataaaaatataacagctaatgtccaaagagcacccgctgcgtgtgaggctcactgcactaaatgctttccatatgtttctcacaagaaccttctaggtagcactattatgattcccacttaatggatgaggaaactaagctctagaaggctaagtgactaatccaaggtcacacagctattatgtcacaggctctgagcccaggtgtatctggctgcggagccaccaccactaacccctgtataacgctgcctcacagaactgtggctggctctttccgtatcccccatgcccctgctccatcatcatgctgtggtgggctctgaactgtgaggacagggatccaggctttcaccctctctctgtccctagctgccagtgcacttgggcaaggtcacatcctatttctgggcctcagtttcctcatctgtaaaatgaaaggctggattgaatgacctttaagatttccctcacttggaaattccacaagtaagtcattatagcatggagcttgcatgcatgggctccagcgtcaggccagcccagctctgccagttaatgggtgtgtggccttggatctgttacctaacctttctgagcctcatttcctttgtctgagaaattgggggtgacggcagtgtactttctttgaaaagttatggtgaggaatagataagatcatgtgtttaaagtgcttacttggcacagtgcctgtaacttagttaaattcaataaataaatttcccattcttcccatgatcatttatttttaagggacatttgtctgaccagtttgatttatgagattattggtgtttttcatgaatgttaagacgtacgtgcgtcatcttagagtcatgtactctgatatattcacacgtgcacatccacttactcggaaatgtacacacccaggcacgcttattctgtctccttctctgccacatacttgcacacattatgtgagtgtacacacatgatgcacacacgtctctgcgatcttccatctctcctcggcagccctgctggtgtattggaccctggccttcatcaccaagaccatcaagtttgtcaagttcttggaccacgccatcggcttctcgcagctacgcttctgcctcacagggctgctggtgatcctctatgggatgctgctcctcgtggaggtcaatgtcatcagggtgagggtaagcaggccacctgggccagggtggggtgggaagcagaggctctggcctctgtcctgccctgggttcaggcccccaccctgcttctcagccaaactgagaagggatcagcttgttttacccgcccgtgtaaaggggagtggggccgtggcggaaatttcaggatagacactgcatctggcccacgtgtgctctaccccagggtcccagagggagaggggggtgatgggtgtgttcgctgaggttggcggatgactttccgtagaaagggaagataagcatcaggcactggcctctcctactttctttcttcgggggtgggggactttgctttaatgtattcatatcgtcacgctggtaaatgaatgagtaagtgttttgttttcctttctgtttgctcccgcctccctctctcttcctcaccccagactccaaccttccccttcccctgcccctacctccccaggcagcccagactaatgaactcgtttgtctttcccatgctttgtttttattagtataataccatatgtgtctgtctaaataaatacctattcaggttttttcctctcaacacaagtgaatatgtaggtttcccccacggtatttatcttgtaagaatgggatcatattatgcagttttctgcactgtgcttttctcacccaacaaatatctcttgggactccctccaagccatctgatatggctaattccgttttcttaatggctgcataatattccatcgtatggatgagccataatgtgttcagctatttctctatggatgggcatttactttgttgccaagttcttgccttcatgaataatggtgtgttgaacatacttatatatttatgtattgctgcttttatttctatgggagagagtccaaggaatggcgttgctgggtcaaagggtctgtgtattttaaattttgatcagtgttacatattgccttccagaaagactgtaatctgccagcaatgagtgagaaaaccctttccctgccttccaaccagcagtgagggctacagccctttcgaacttggactgcctgcatttctctgactcttctgcttttagttggtgatctgcagggcacaaagctccttatgtgtccccccatccagtgaccctcacaggaaccctgtgatgcaagcaccatcccctttatagatgaggaaacattttagatgaggcttgtccaaaaacaccttgctagtaagtggaggaggcaggattcaaaaccaggtctgcatgacttggagttctgtgaactgtatatgaaacatggtggtatccttagatctgtggagaagatagcatatgagagattcctgctcctccccaacccaacctaaacccaacccagcctagccatggggggttcaaagtcgacctcaatgagcagttacaaagtcaggatgccctgacattggtggccaagaagtgttggggaatccttttcctggtaataattacaggcgaaagatggccccatctgttagagatcaagtgtggaatatcacaaccccagatccttgctggggcaaggtagggagtggtgagaagttggacttacccatcccccatggcccatgtgccccacagagatacatcttcttcaagacaccgagggaggtgaagcctcccgaggacctgcaagacctgggggtacgcttcctgcagcccttcgtgaatctgctgtccaaaggcacctactggtggatgaacgccttcatcaagactgcccacaagaagcccatcgacttgcgagccatcgggaagctgcccatcgccatgagggccctcaccaactaccaacggctctgcgaggcctttgacgcccaggtggtcagtgggggcacagccacaccatctattcactgccttctggtttagggtcacagagagggacctcaaagggcattaggtcaaaatcctggtgggacaagaggggaaactgaggctggtgaggggaagaagcttgccttaagtcacacagtgaaccagggacaggtgcagggctgaggattcataggacaggcacagttggaatggcccttaccgtttaggtcgtctagtccaaagtccttatccagatggggaaactgaggctctgagaagggaagtgaccccactggactctcacatccctgtgctctttcctctgcagcttactgactataaaggttggagtgttcacttgatttggagcaggggtgttagtggcctgatccttatggtaactctatgagttgagccagacaggaatctccccatatcactgaggagcaaattgaggccctgagaaaggctgtgacctgcccagagctggccacagctggcaggcggcagaggcagtctcctggctcccagtccagtgctccttcacttcctctgccctcgcaccagggcagttgctgaggcagacacggtggcaggtggtaatgagtgagtgtggcacatggccacctcctcattccagtgctgtgctcatcacatagtccctgaccagctgtgtgaccttgagcaatcatctggccttagtttccccatctagaccatgttggtgttgatagggccctcccaactgtgcacttgctgattccatgatctcttcctggagttcacctatttgcagaggatgtgaccactgggtttccccagacaacaggagctaggggcatcctgggaggctaggcccagccgtgaattagccctcaggcactctgacctggccatggtctctctgggcagcggaaggacattcagggcactcaaggtgcccgggccatctggcaggcactcagccatgccttcgggaggcgcctggtcctcagcagcactttccgcatcttggccgacctgctgggcttcgccgggccactgtgcatctttgggatcgtggaccaccttgggaaggagaacgacgtcttccagcccaaggtaggcagccccaggggtagggtaaggcaccctctagatggttttcagttgtttctgagagtgcaacaggccaatgtgtgtgagccatggccacactggagtggctcctcacacatgcgcaaagcccatagcagtatccccaccacagaatactctacatctggtcaacagaaatgccagagggcgagcctatgccccaagggtatcctactctcctctcaccgtcactaccatagtacctctcccggtagttaggtcagtccgaaaactgcaggaagtgcttttgtttgtccagtgtctagagcttctgtgacttggatttgttggctttcagttcatgtcatcttagtaaactctttaaaagttttcaagatctgtcttcttcagtcctgtaaaggctggcacttgagctttctgcaggggcatcttgggagctactgtcagaggagagagaagtgggaaaccctcacgagtggagctttgtctctccccactccaaatttcattcaaagctgcccgtagttttattaatatgttggacttttccattaaaatttcttttttaagaaaagtttccatggcttaaaaaacactggagacttattagactagattatatccaatggccttggcagttgtaacgattctgcaaactgaaatttgttggagctagaaaacctttccccggggttatttgccctgcgtggggccgtagcatccacttcgggggctgggcagactgtgctctgttgtctgtttccttgcagccgtttaggtttaaatggccacaaaatgaaaactttttcacccctaataagtttcagagttttagtttccaagtgaggatgtcattataacattttaaccacagacagtctgaaaataatgcagagaatggggaattagggtttttaataatttatgacaccctttgcgtaacatttgttcatctcatgagctccaaaatcgcagccagcagttaatcctcaggaggtttatgttcatttttctggagacataattagtcagctgaacagttttggccacagatatgagatacgttgagtctgatttatgcagcaaactttcattgaacactgctgtgtgccaggcctgggttgggctgtgggaatatgaaagcaatagttatgatgaggatgattaacaatattaacagccacttactgaccacataatacatacctggctgtgtgcaggagttatccatgtgttatttaatccctaaaactatcctttggcgtgagtatattttgcaacatctttactgtggtatacctcaaatactgtacagtttatgagatgataggtattcttatccccattttacagatgagaaagttgaggctcagaaagtttaagtaattttccccagggtctctcagctagttaataacagaggcagaatttgaacacaagactcactccacagtctgggcatttacagccaggaagctaaattgactattattatcaagccatcacctctggctccaaggattatgaaatccaacagtgaggagagaaatcaaaataaaatacttttatgctatgtgttacatgtgactcttaggaggaatattcagggaattgtgggaaaagatagtgattaacttagccagtggtcatgaacagcttcatagaggaggggatgtttgaaaggggtcttgacggatgagtaggaatttgccaggctgccatgggaagatttcttgctcaaccaagaatgcaaggaccacttttgcttatttaaactttgatggcttttgaagccatatctggctttttgagcctctctactttacctggcccataaaagagaggggaagcggctgcttctcttgtctacaggagtgtcacctttggctctagcctgaccataggctaccccagaatacccccattggcgatcctgaagcagcatggagccagttgttaatatcagggggaaatggcacaggccagagcccttatcagagtgtccacaccacgctcttcttcctgtgtttcccaaaacccttgtgggattctgctaaggagagagctctgaggcaggacgtgccaaagagatggcgaaagcacttagaattttagttcatctgaacgttatcattgccgtttttttctctttgtttatacacaaaccctggggtttattaccgtctcattggaatgctcttgtcccagttacttagcacacaaatccctgagacagatggccctgcctcagtggcagtgggccttatcagatttaatattttttccctgcagcccaaacacaatcagaaaatttccgacacagaaacaagagttgaaagtaaatatagtctccagtgtccgcaacaaagaactctccatcatgtggttgcctgggatgtggcttaattctcatgtgggcttctgagctcagaaaatgggggaaagggatcatttactgagatcatttggttcatctcccagcccccaagccattctaatccagagagaaccgagtgctattctggtctttatgaatgacaaagaaggaagctccctagctacatgttgcagtgtttcacagtctgggagaggaagccgttttttctgcccagcctgaatccatcctgcagcagttggcacagcgaggcacctgtggtttattcatcatcactcttccttcctaagatactcagagttggcaagaaacatgtcatccttggtatccgcaaggacgaacatttctgatgtcctctttagttactgaaagtgtctgtgacttgccagatctttgatgctcctgtcaccccgctgccactccccagggaaagctgggacccaggttgggctctgcctatgatctatagctctttccagcctcctctccaacccaacccctactcccaatctgtcacctcccatggatgccactgatctggctgaaggacaagagaattagattcataatgagctgctggtgtctgaaacctgccagcactgccctgggctatcagttgagccaaaggaagaaggaacagtctgggtttgatcgaagggctaaagcttcaaacagcctctaagtctcagtaggaaaatgtgtaggtttgggagggtgtatgtgtttccgaatgagttcccctaagaactgcttatggttctatatgtgtgttctgtttgtccctgtgtcttttggtgtgtctttttctgcgtgtgtgtgtgcatgtgtgtgtgtctatgcccccgtttggattgccatatttgtggctatcattatgagtgacttaatgagtgtatatgcattggtgtttctgtgactttgtggttttgatgcatgggctggcctcttcataaccatgtccatgcagctggtctggcctagagtacctgccttcaattcactagctccttcttggccatcaagactctgctcaaatgtcacctgctccagggagccttcacctggttgaattagatgccccttatctgtgctcacataacatcctatcaaagcgccctgtttctttccctgacttgatcctctgtcccctattgcctgacctctgtgtgcccagcactcagcccactgcctgacacccaggagatgcacgggaaatggttctgcaaagaaggaataatgcagcaattactatatattgagtgcttacacttactgttttttcacatgcactgttacattgacttctcataacaactctctgaagtcccttcatagcctcaccttacagatgaggaaactgaagctaagagaggttgaggaacttacctaaggacacagtggctaatatatgatgagtcaggacctctaagtccaggctcttaaccaccgtgtcaaacagtcttgtatgaatgggtaggtgtgttggtctctgggtggccaaagataattttattctttacccagggcctcccggggctgggacctacggacaactcaccttttgacacctgccaaaataggaaacaagagtccaagtgatcccctctcctttaagcaccagagaacatgtgaaggggacctttccaatcatacctctggcctggcagagacaatggggctccaaactgtagagtcgggagtgctgggttttagtcctacctctgcagctaactcatttattctcctcagcagtcacattctgcaagcctcaaatgcaaaatgtgtaataacttctgtagaaagtacatgggggcatgaagatcattggcttgattgcttttaaaaaatcggtattgagcactactggggaaatccctggaaacaaacacaattcttccctgagagcttgtgaaaatgcaagactagggcctatgattttccaaagcattttcttccaccaagtgtcaggttgtaggtccttggtcttttctctcttgccttggtacctgcagggtgctgaccagtgctatcatatcccctccccgtttcctaggaccctcttctcggtagactccaacagggcctgccttccttgggcagcatggcaggcctcttggctagtctagtacccacttcttttttttttttttttttttttggatggagcctcactctgtctcccaggctggagtgcactggcgcaatcttagctcactgcaacctctgcctcctgggttcaagcaattctcctggcccagcctcccaagtagctgggattacaggcatgcatcaccatgtccagctatttttttgtatttttagtagaaacagggtttcagcatgttggccaggctggtctcaaactcccgacctcaggtgatctgcctacttcagcctcccaaaatgctggaattacaggcatgacccaccacgcctagtcaggtacccacttcttaactgaaacttagctattccaggttctatcccttttaaaccaactctttgaagagaggtctaataatgacccaatgacttatagctgcagtgagatttttattttaacaggtcacaaaattctcaatccacaaaagtagatttctgaccctaggttattttgttgggggcggagagaggaagtcaaaggttttgcagcctttagagctgcaaaaccagaatttgttgttttgttaaaaatgcacaaataccgacgagtatatttaagtaacacccatagtctaacgaacaaacatgatcagttggcttttccagccctcattctccagcctgtgtgttttctgctcattgtaacacagcgtgtgtgtggcattccatgtttctccagagctttcatgagaatcagtggtcttggatgcatagtgttcccatgagtaccttaattacctaaccattccctgtggttggaaatttatatgggtttttgcattctccttctgctctgaccccaaaataaatgtctgtgttcatacagctattaccttatgtgaaattattttctttgggataaattctcatgatgtgttgttgctttaaaatagtggactccagtctccagagctgcgtctctgcagaggacagtgggacagaagaatcccagggcatgttaaaaaggaccgggtcttcctaaacccacatgcctatatttctgacccagtaccagccaggggggcaagtttccatcccccacaagtcacaaacctgtaactgacactaggatgcttaaggtcaaaggcctggacgaggcctagacagtgggtctggggtagtgtttttgacatcactcaggttcatgttcacatgttgtccccttaccagcatgtgaccttgggccagccactaaccctactgaaactcctttttttcatgtatgaaatggggctaataatggtaccctcctcattagggtattgtgaggatagagttttgcacctgataaatattgtctcctgccccttcctcccctggaaattcaggtctctccctgcagcctaattttaaggcccatttttctgcttccagcccacccctgcccttctaccttcgacctcctccctctgcctctccctctggtgcactggcaaatgggacagagagcctcggtagggccttcctcttagagtcttgcacgcatccctcagtggtctccctgtggctgcttcctgctgccaccaacagatacagacccctgtcgcacagatcatggtagagacagtggtgagcaggaccagacagctccagggagcagtgagggctggcttagagaacctctgttaaactgagaggccaccatcaggaagctctgatccaagatccaggaatccctgactctagggaaaggcctccaatgagagcctgggccctctctgcctgattctgattgtggatgtgccctcaaactccttctcatcactttgttccatccctctttaccctgcagcagctcccacaccctgccaaacaggatgcacagtccagggcagtgtctgagaaagagcagagatctgtcttcatggaaatattgatgtggctctgctggggagcaatggatttatcaagatcaaagttttcctgggagttattgatgcttaatttggaaatagacacactgttgatccctggtatctttagcaacaaagttaaaatgtttgtttttcttcactggttgccatctgagatcttgccggaagtacacaagagaaccttaaatttaacaggaggccctgggagcccatgaggctggcgggcttgggtctgaaatcttttcagtctcttgtaagtgatgagctctcattctctcctgagagctctacggtgccatgttttccactggccttttctgctcagtaattgctacattacaggctgttggtaagttcggaacaagggagctgctgattccatttctgtagcagagaacatgcaccgtgagacttgttgtaccagttcaggttttaggtgctctatttattcttgccccattcagaatgctctcccctgggtctgtggccacaatgctaagagtcatatttatgggcctgcagttgtaattgggccccattctgttcccccaagtggaaagatgaacagggtgtaagcaaccttccctgtagttagaaaaacgtttagttggatttatcagtctgatttttcactcataaacaattgcacaagcctttgcaagcccagagggtcttgtaataatgatggccgtggtccattatggcacagtgatgtgttctacggtggtcattttgctggcaatgacagtcacctctgaacttctctttccaacagacacaatttctcggggtttactttgtctcatcccaagagttccttgccaatgcctacgtcttagctgtgcttctgttccttgccctcctactgcaaaggacatttctgcaagcatcctactatgtggccattgaaactggaattaacttgagaggagcaatacaggtacttggatgattattttttcactttgccataagaaccattattaggaataatgtccatgagtgttattcatcctcatggacactcaagaataattctgctgtaaatttattttttgttgcccattaacgatgttttaaaacagtaaccattgacaaggcagtgtgggatagtggaaaatatcttgggctgaacttgggagacagtgtagctctggctctggttctgccttggactgggtctgaaaatccagctgctcagcccttggcttgaaagtggtagacgtcactaattgatcacagcactctttctgaccaagggtaaatgcaaccttggaatcctctctaagtggctgttccagagttctgctaccagacagtcttctttgggtgtgaaaaaaggaatgtgcttgacatacaaggtctagatagcctctaagacagggtcccctctaagatggggtattggtccatggcctgttaggaactgagccacacatcaggaggtaagcagtgggagcaagcattactacctgagctctgcctcctgtcagatcagcggctacattagactctcataggagtgcgaaccctattgtgaactgtgcaggcaagggtctaggttgtgtgttccttatgagaatctaatgcctgatgatctgaagtggaacagtttcatcctgaaaccatccctctcccccaggtccatggaaaaattgtcttccacgaaaccagtccctggtgccaaaaaggttgaggaccactgctctaagttctatttgaacccttaagtcttgctcactaatgagagtgacctatttggtctgttgggtcacttaagtctaggctcttggtcctgccttctgtgatttccttcttagagtttctggaaagatgatcaaagccagggagtgttcagggcccctctgaagaaggtgatgatgagagttgtccaagtcccagggtcttcactaggattttggttcagctatcagactagagagacatcctgattgagagtagtttaaatgggatagaagtttgtttattcttcagatagagtcagggctgacacaggagctactcaatgatcagagacctggcttcttctgtcatgttgctctgccagccttcttttgtgacttttgtctccatagccatggtgggtattgaaactgccactatatttacatttaaactagccagaagaagggacaagaggagggaacgcattttccttttaaaatggtaatacctgatttgcacataccctctcgcatcccattggtgagaaagtggccaaatggccgtatctagagagtctagaaagagcttggtctttattcttgacagctatatatgcactgctagaaattctctgtgcaaagaggagaatgggcattgggaataactagatgcagctatgcctagtgatgtccatgaagttgtggtaaaatcctgaagctaccttgttctttggaaatgttcctcagaatcattaacattagtcatgtgggagacaggagaagaagctctgcagaaaagggaccgagaggacaaggatatagcttgggctggggacaatgtcagagtccaaactctggctatcttggaatagtctgtgtgaacggtgccctcccaagttgtgcagtgcacaacctgtgcagctatatatggcaaccctgcccatccccagtggtttctcactgggaaagcagagtatttcctcagggatgtcattatgtgacaatagtggaaaaagcccaggaaaatctaagaccttctaagactcatgggggcccagagctgggaggaaccaagctgttgctcagttcagaaaacttctctagaaatcccagcctctcctcacacccctccagtgacaggcagacttgcaccaccacaagcaacagccacttttgtggttgggcagttttgtaattaaatatactaatgtgtgtatgtcataaattacattttccaattatgccaaaagagccaaaaatggttttttaatggttagcatataatcgtttttatcaaattgcttgaatctttcatgttaataagagagattcattactatgccacaaaaagcaaatactggcattaattatagaaacaaattaggggggtggagcgcaatggctcatgactgtaatcccagcgctttgggaggctgaggcgggtggatcacaaggtcagaagtttgagaccagcctgaccaacatagtgaaaccccatctctactaaaaatacaaaaattagccaggcatgttggcgtgcacctgtagtcccagctactcaggaggctgaggcaggagaatcgcttgaacccagcaggtggaggttgcagtgagctgagatcgtgccactatactccagcttgggcgacagagtgagacttcatctcaaaaaaaaaaaaaaaaaaaaagtggctcatgcctgtaatcccagcactttgggaggccaaggcgggtggatcacaaggtcaggagatcgagaccatcctggctaacatggtgaaaccccgtctctactaaaaatacaaaaaaaaattagccaggcatggtggcgggtgcctgtagtcccagctactcgggaggctgaggcaggagaatggcgtgaacccaggaggaggagcttgcagtgagccgagatggcaccaccgcactccagcctgggcgacacagcaagactctgaaaaaaaaaaaaaggaaagaaagaaggaaaggaaaggaaagaaaggaaaggaaaggaaggaaagaaagaaagaaaggaaagagagagagagaaagaaagaaagaaagaaagaaagaaagaaagaaagaaagaaagaaagaaagaaagaaagaaagagaaagaaagaaagaaaaagaaaagaaaggagttagggagaaaaaaaccctttctttctttcttttggagatttccggaaaatgtacccttacggatgagagcctgtgtcttcatgggttagagaataaccacgctttgtgcataaaaagttattaagcacaattcctgaattatacataattactagctgtcagtcagttgtgcatttctgtgtatgctggtcttcacttaataagactttatttcacagatcacttggtgtccctacttcactgaaactaggtgattatcttttgaagtctcatttcacataacctaggaggtatatagatttctttaaaaatgtcattgccattattttaaaccttacccatggtatatataaacttacagaaagacagaataggttcattattttaaaccttgcccatggtgtatattagctcacagaaagacatagaataggttcctgccttaagaaaacctgacccacaaaaaagcctgggtttacacaaaagaggaattaagggcggggagcccaccttacaacagaatgaataatagaattttatccaagagcaggcatcctgaggacatttaagacccggatgcatttttccttgttcaagagcacacatccaaaaattgcagtctttctgcgagtcatgatcactctgcacataaagcgtttaggttcagagctcggggaggccattaccatggctgctctctgtctgccctgtgagggtccttggggtggctgcactctggggatggtgctggggctgactgactcacgcggtcgtgtaacacatcagaccttccaaagtcgaacccttgttttgtttcaaggctcaattatgacaggacttggtctcagagcagatcccctccctaggctggagaaggccactttaaaacagatggcctgccccacttcatcatttttatggctctgatctgtgttctccactggcctctggtaaatcaagaatacaagtggacatgaagatctgctttaaaaaataaagaacagaccgggtgcggtggctcatgcctgtaatctcagcatttggaggccgaggtggatggatctcctgaggtcaggagtttgagaccagcctggccaacatggcaaaaccccatctctgctaaaaatataaaaattagctgggcatggtaggcacgtgcctataattccagctactccggaggctgaggcatgagaattgcttgaacccggaaggtggaggctgcagtgagctgagatcatgccacttcactccagcctgggaagcagagcgagactctgtctctaaataaataagtaaatgaattaaattaaataaaaataaagaaccaattaagtcctgtctacaggaaaaggccttacttgctggagaagtagcttgctgtgctggagtagactagtaagttggaacggtgatacagtaccaccttacagagctgctctagggcaccatggggactgtctgagaagcccctggcacactgtaacaggtggcatctggtgtggtgatgatgatgagaatgatgatgaatgtgaaacactctgctctcatttctagaccaagatttacaataaaattatgcacctgtccacctccaacctgtccatgggagaaatgactgctggacagatctgtaatctggttgccatcgacaccaatcagctcatgtggtttttcttcttgtgcccaaacctctgggctatgccagtacaggtactagatgggctgaggggaagggaggggggcagcaggacacacaaccagaatctgctggtccatggccagtaactaggagcacaccgtcttccactccatgcttgcctgtacctttcacacacttggctataccacaggctgtacctctgggtccctcctgtcccatactctgcaagcactgaccatctctcttaatgaccagagaaggcagtatcattaagactttaaaaatggagccaactttataaactatagaaaaatcaagccaggttcaggggctcacacctgtaatcccagcactttgggaggctgaggcaggaagattacatgagcacaggagttcaagactggcctgggcaacacagtgagaccccttctatgcagaaaaaaaaaagaagaaagaaaagaaaaatcgtacatggaatgcccacagatcttaaaagctatgttgtagcaaaatatttaattacatcaaaaagtgttagtgatgtatttttaagcaaaaagagtaagttacaaatagtatatgttgtatgcttactactaaactggaatatatgttatgtatacatttgtacagattcacacatgaaaaagaattggaaaatcacatagtgggattataagtgatttttattttctttatgtgtttctaaattctctaataagcgtgtataagatttggaaatcaacaacatgatacttttagcctaggcaacaaagtgagaccctgtctgtacaaaaaattagctggaagtggtggctcacaactatagccccagctactcagaggctgaggtgggaagattacctaaagtccaggaggcagaggttgcagtgagctacaatcacaccactgcactccagcctgggcgatagagtgacaccttgtctcaaaaacaaacaaaacctggtgttttttagccagatgtggtggtgcgcccctttagtcccagctacctgggagtctgagatggaaggattgcttgaccccaggagttcaaggctgcagtgagcaatgatcacgcccctgcacttcagcctggacaacagagagactcctgtctcttaaaaaataaaaataaaaacgttaaaacatggtatttttttaaagcaagacaacctttggtgctggctcaggaagaggtacattaccccccaataatcagaggagaatcgtcagcatgattgatctgacctcgggcttcatgtgtcccatctcccacccggagctcttccaccacagagtctgatcctgtcctatgcctgggactaaatcttcaccctggtgttcaggccagaaaccgaaatcccagacccattcccagagggcgggaaggttccaccgggagagcttgatgtagcagaaagtgacttgggtgagacaggctgattcaaatacttaacctctctgagccttggtttctttatctatgaaatggggaggctgcccaccctctggagttgctatggcaattcagttagataatgtaagtaacacagcaggcagagtggcccccagagtcttcacttcgtaaatatcagatccctctaccttgcacatgtttggtatgagtgaggtgttaccaatccagaatccattgcttcttgggataaagattccataaaccttcatctccagtgatttgtattggtcctccttacttgtaaagcttagagtttaaaaatattaaaagaaaaaaaggggagaggctcccacagggacacagctagacaagatgagatgcagggaatctgatgttcttttttatgggaacagtcatatatgccatcccccattaccacctacccatgcccagactgcccccgctccattctgccaagacagatcaatgactataaaagctacaaaagggcctggagatctcatctagtttagttaccaaccaaccttttatgcacaagactttctaagctgggtgtggtggctcatgcctgtagtctcagccactcaaaaggctgaggtaggaggatggcttgagcccaagagttcgagtccagcctgggcaacatagagagacctcatctctaacacaattttttttttgaaacatgaaaaatgaagatttctgaccatgcttctctcattagttaacactttgggctgtgagggtctgatgcagagagacacagcctgggaggatcctaacatgtacacagcattcaaaaggctacaagacactttctgttgtgtccccttgaacaagcagtttgtaagattttgttggccaggcatggtggctcgctcctgtaatcccagcactttgggaggctgaggctgatggttcacctgaggtcaggagttcgagaccagcctgaccaatatggtgaaaccccgtctctactaaaaatacaaaaattagccgggcatgatggcgtgtgcctgtagtctcagctactccggaggctgagacaggagaattgcttgagcccaggaggcggagactgtggtgagctgagatcgtgtcactgcgttccagcctgggtaacagagcgagactcggtctaaaaaaaaaaaaaaaaaagaaatcaggttttgtctactaaacctgctgcacggttaccgttactagtactcacagggtttgttgcacatgcatcgttgctaatagtgctaactaatattaacagcccttgccctatgcctggccctgtcccagcccccctcccttgtataatttaacccttgcactgggggtagagattttcatatctactgatttcttacctttgctcatttatcatggagtgtcctttggttttctgtgtttgtatatacctttaccacttatagatttgaccagcactcaagaaccagtgttactcctgggagttaatacaatcccagccccatggcaaagaaactcatgtggttaggattctgtgtgcagcctggttagccacagggcacgtaaggctttttataatattgacatgagtgcagaagccccattcccgtgtaagccctgagggctcttgtttcataatctttttttggtcacatgcacacagctttattgagatataacccactcatttaaagcatacaaatcagtgggttttagtgtcctatattcacagagctgtgcagccatcatcacaaatgtggaagttttcatttccccaaaaagaaacccgtacccattggcagtcactcctcatcttcgcccccagcccttggccaccgtttatctacacatacttttgaaaggctagtgaaactttctcagaaaaataaatgcttgctcaaacatttgggctataatttcaggggcttcatgggtgcccccctgacatttatcaagaacaccaggttaaggaatttagctataatggaggcctctgtgtttcccagtctcctgggtatcagaggcccagagagggcaggtgccttaccctgggccacgcagtgaaccagtggcagcaccatactcacacatctcctttctgcggttccccagtgacagagttctcaggaagctttttcatttattttctgagaggagggtaggccatcttgtattgatctccaactatatgccagccacaattctaggtgcttatcataaaggttcatttaatcttcacaatagtcctgcagagtggacagagtccttcagagtgggcattataatcaccattttaaagatggagaagctgaaaaccagagaggttaagtaactcacccaagactgcacagcaaaaggctggggctttgaaactcagggccacagactccaaagactatgtcctccccactatgctagatttttttcctaacctgtgaataggagacaaaatagtccttttatttctcacagttgctttgcacactcagaatccatgatttcttctgcatgagggccattcagacctgtgcagaagagagtaatggaccaaggagtcttgggagcacctaggaggaggggatgggggagcatgaggaggagccagggaacagcagcagctgcagcaccagctcccaccccagcctctgccagtctcttggaggtggtgtgggtgcagacaccggctcacaaggtgccctgttagtgagcttggggtgccatgggagccttcttgttgtcaggcccaacccaagctggctgaagaacaccctgatggcctccatttgagcacaactaatgaaggactggatgccagagataagtccaggagggtgatgctgcagggcaggccagggaagagggtacttcatctctatcatggtcctctgcccatccatgccagcatctaacacctgttaaacactgggaggcaggtggtgaaggggccacttcccagcctctaagatacctcctaagccaggaggcattctgtgattaaattacagggcctcccacttactcctttatccttgaggcggtgctggaagcttaatgccaatctggtgtagggctctgggactacaggaccaaggcaagcagtcctttctctctctctctctctttttagctaaggaagccagcacatctgttctttgagaaaaagccctgtatttagaggtgtctgcctttgaaggcaacctgagaaactgtcatcttggcgctttggggactggccatttacacttctcataaatattcagaagtaggcagtcatttacataaagctaaatgcagaaggaattctcttttcagggaatacctggcagattcattaaaaaaattaaagaaaccaagagcataagaatgaaaagcgaattctcggaccccaggctggttttttctggcatgggtgcagtaactttgcctctttgctcagttatcacttttttccaatgacagtaaccataagccctgagagccagcaaatagaacaaaaggtgctgtcacaaacattgtgcaatctcatctctgagatttccatctggaaaatagactggagagagttaaggcttcaaccagccttgcagataaatgcagttagttaccagcccagcaaccctctgcttgcatgagagcccattatgctaacctccttttgaaattgctttgtttctcctccttccctgcactccactccccaagataatttggaaacctgggcaccaaggcttgtcccactctaggggactggggaaacagggattttgccagcacctcctggcagggcaaccatcaggtcaaagggacctgacccatgaccccttcctcagatcattgtgggtgtgattctcctctactacatactcggagtcagtgccttaattggagcagctgtcatcattctactggctcctgtccagtacttcgtggccaccaagctgtctcaggcccagcggagcacactggtgagtgcccaaaggtgtgtgtgttttgtccctcttcccctccttccctcgacagcagcaggtctcctcccacacacccacactgtcattgactttgactttgactttgagtaggccacttcacctgtccaggcctcagcttctttgtctgggaaatggagtcaatgggggaggaggctgcctcccggtgaggacaggaggcgggcatggcagtgacagtattgacactcaggccttcctctcgggtgggagacggagcagaagcctctcccctctgactcggggacccctgcaggagtattccaatgagcggctgaagcagaccaacgagatgctccgcggcatcaagctgctgaagctgtacgcctgggagaacatcttccgcacgcgggtggagacgacccgcaggaaggagatgaccagcctcagggcctttgccatctatacctccatctccagtgagttcaccccacacagccagccctgggtgctgctgcgtacatgcaaggagagggtgtcagagctcgggtaagagggggtgcagggacagaagcaggaggccttgagattatccgactcagtaggggagcctcaaactggctctgatagctaagctcccagaaatcaaagtactcttcattcatttatccaacaaacatgcatggaaagcctgctatgtgctggacactgtgctggccctcaggatacagtgatgaggaagagagatgaagtttcattcctcatggaactgatatgttattgacagacagcagcaagtaagtaaatgaccacagttttgaactctcctaagaatgaagactttttagtaagtcagactgagctgtcattgccctggggaagctacaagaaagcttccatccacttggggctatgcaaaagaaaaagactagttatccttaaatatcagaagcccaggctgaaggtactcacaggtgtagggactgaatttatattaaccaagtagtttgggaaccccaagccaaggaagaagaaaaagaccaaaactggtaaaagtcctagagtcccatatacttgaaaccattttactgagaatgtaaaacttttttttctttttttgagatggagtctcgctctgtcacccaggctggagtgcagtggcaaaatctcggctcactgcaacctccacatcccaggttcaagtgattctcctgcctcagcctcccatgtagctgggactacaggcacacaccaccacacccgactaatttttgtatttttagtagagacagagtttcaccatattggccaggctagtcttgaactcctgacctcgtgatccacccgcctcagcctcccaaagtgctggaattacatgcatgagccactgtgcccagcccaaaagattttttagaaattgaaattttagttatggaaattaattcagtgaacaatggtcccctggtcagagtgagggcttacggaggtcaggtgatccatggagtcctggcccaagtttatctcacagttggtctcgtggctccgtggacccatcccatggtggttacttcccaagtgcataattgggatgtagatatttagcaaccagctgacttcacactagttccctgacctgtccagtctaagagtcattatggccaagtggaagcccctggaaagaagaaaacaaaaaagaaaccaaaacttactcagtgcacaggttacatgaatgagtatagctgaagagagaatttttgaattagaagacagatgagtggggattacacagaacgtggcaaggagagtaagttggtagaaccattttacagatgggaaattaaggccagaggggagtgtgttcctgagatccctcctgaggttagtagcatggctcggactagatcctccaaagtctcttaactcctggtctcaggctattttccacaaagagctgggggcctctgtggggtgaagaagacttaggacaccatggggcaccattatgaggccatttcctcctaggagaaaaaaaatctctgggctctgaaaggagtagaattagggtaggaaattaagagaggctaccgaccacctcctccaactaaaattggttcttttggtgccaggaagagacacacctggtgggggagggaaggtggtaatggagggggtgctggtagtgtctcccagatagacccatccaacaagtctcatggagaatgagacggtcactcaggtcatctgcgtattcttggcattcttgctgcctagagagagagtctgatggagctaggtggccaccaagctgtcccactccccaagacagtttggaaacatgggcaccaaggcatgtccctgtctaggggactggggaaatatcccatagcagtgttctcacagtatggggctggccatgaataccccaggagtccaacctccctttgtccagctagaccatggtgtcctatgcctcaggcagggaatgtggtccagtcatcagtggctgggccgtctgccatacatggtgcaagccatggcgttttatgcagaaagtcctgctagcatttgattttctcagaatggagctgtgagcatggcaggcaaccactgtttcctggattcttcaccaagacaccccaagttcctggtctctccccgttatcctcatccctgaccctgtggttctcagagcctccaaacacactcaggctaagcactccatagacaggggaaatttggaaggaacatctagggagctcagaaaagccaatgtccctagccccaggcccacttcaaccttctctctgtcagtcctgcctgcccctggaggctggttacatgaagagtaaccccctgcttgtgtatagccccccagttttgtacaggtttagagacagttcccagcagtaggaacagctgccgaggtgggagagggcttctcccgatagccgggggacttcctctcccaggaacaacagggtggggtagagcaggcttgtcgttgctgagatagagagagggaagggaaacaacaaggaaagtgggggcactgggtccccaaggttcctggcacagcaagcagtgaagttggggcagcctcaggtcatgtagtgggggcaggtgacatctgctttgactgctcctaagagatatgtactcatctcctggattccaaactgcagcctgggacatgttttcttatataaacagcatcaaaagatgtgtgagttcccaggctagcccactgaaccctacctagtgggtgctcattgtcccccagagcccccagaagacaagccgtggctttgtgatgggcctggggccaggaggacctagggatatgttgtgaagagctgagaagactctggaaaaaaggggctctggagccaagcaggagcccgcccaggactcctcacgtgtccaagtcacctagggagagaaacagagcagcccaggttggtccctggaagagagcagcggaggaggggaaaggggagagcccctggggagagctttgaaagtcaagtgctgtttgctcagtgtgtttgcctttccgaggatgtgtttttttttccctccgttagtcagcagtgggagggggagagagacgggtggtagggtgcagggtacctcctggctgcaggcatatgctttgagtgcgtgttcatttacctcctctggacttcctgccttctgttaccagggatcaagacacaggtcattaggcgtgaggtaatggggcatctcttgttctgacccctggcgccagtcttggagtcctgacgctgcagaggagccccagagtcacatttcctgttggggcccatcctgctcatatgcggcaccatcagacttctgggcaggcaagattacctgtgactctgtctgatggtctcgccatcaatatcactgagagtagctgtgtatggagtcccgaactggtacaggataaaacagggggctgaaaagggaatgaatgggcacagtttctctggcatcaaaagtcacatccagaattgatatttcctgttgagtaaaaatagaaatataagttgctcagtggatgttgagtgagccctattcatgtgccccactctgtgccaagcaccaggaaggagggaagggaaaaatgataagatgttctccccgttctccaggagtttatgctccactaagaagtcagagctaacatgcacagaacagtgtggcagcgagagcagaaccgtgtggccagctccatgcttgccgcctagcaagcgtgattgcacttcatcctcataacaacttggtgaggtgtgttgctctgttgtcccattttacagcagagaggactgactctcagtgaattgaaatgtctcagtgaggtcttccacagcaaaaggcgaagcacagagaaggaagtccatgtgggctgggagttcacccagagattcatgtaggggcaatgtgggctgtaccttgcaagatggtgggatttcaatgaggagaagacaaagtgggaggaagctggagacaaggactgtggtctcttcctttagaagtcagttcaatctttttttccttgtggaagcagcataactctaggtggttcctctgtatctgaggacaagctttgtagaggtgacaaaggggtcctaggtcctatcaggcaagcactcgatatgctgccagttcattctgtccattgtgagatacccattccagagcgcttcctctgtgccaggctctacggaggttctggatgttaaagaggaagcaggcatggccctggccctcccagtcttgtgggagattgatcatgcccatgaatagtgaccatgtggtcagagccacagggtcaattccaaatgcccctgtttctcttttgtgttactcacctgactctgggtctttcgtttcttccattcattttttttaaacaaatatttcctgcccaccttctgtgtgccaggcctggggatgcagtgggagaagcctctgtcctcctcagtggaggcgctaactcagaacaggcagtggagaaaaacaacatgacctggagacctggtgccccttccttccccagcatctttgaaattcttttggttgttgttgttttgagatggagtctcactctgttgtcaggctggagtgcagtggcgcgatctcaactcactgcaacctctgcctcccaggttcaagtaattctccctgcctcagcctcccaagtagctgggattacaggtgctctctaccatgcccagtaatattttttgtatttttagtagagacagggtttcgccatgttggccagcctggtctcaaactcctgacctcaggtgatccacctgccttggcctcccaaaatgctgggattacaagcatgagccactgtgcctggcctgaaattcttcaatatctacctgcccttctgccagttggtgcagccacagtgggctgcttatgcatatcctggcctggcttggtggggagcatggctgagggagagccggggcacccatcaattaaggaggtaaagatcagtctgactgagatgcctcctgccacacttcctcagctgccagcaactgacaccattaacctgatttccttccccctctgttgactgcactgactattggactgaatgggaaacagccccgtgcacctcaaaatgcacttcccctcctgcagatgcatcttgcaattaggcccaaactgtgagcctgcatgctcctcccctggccctgcacaggcaacaaagctgaagttaatcagaggtacaaatggctggctatgcctctctgacacgtaacttctggaacatgtatcaatgctttggaaatgaaaagctcctggtattgcaatgccaggctggtgcccataagggccagaaaacattccttgggcaaagccagggggagtgggtgatctgatcccagctcaggtttgttgatttgttgttttgtttgtttcgttttgtatggggcaagggttgagggtatgaaaaacttacactatcatttactaccgtagtccccagaacccagcacaccagcacaaggcctggaacagggataccttttttgaatgaataagtctttttttttttttttttttttttttttgagacagagtttcactcttgttgcccaggctggagtgcagtggcgcgatctcggctcactgcaacctccgcctcctgggttcaagcgattctcctgcctcagcctctcgagtagctaggattacaggtatgcgccaccacgcctggctaatattttggtatttttagtagagatggggtttcaccatgttggccaggctggtctcaaactcctgacctcaggtgatccacccaccttggcctcccagagtgctgggattacaggcgtgagccactgtgcccagccttgaatggataagtcttaagggatatttttggaaaggatattctaaaaaatacccatgtctctacactattgcagaagggctttcagttttgatggcagcctttcaggccagcctacacgcaactaaacttttccataacagcatcacacttacacaagaagaaggttttataatccacttgccattatttaacatagttcttcctccttaactttcaagatctgagcactataatgttcttctttttgtttttgtttttttctaaatcaaattaaggtgagtcacctcaccttgggcctgagttggacagaaatctattcttggctatattccccacccctccaccaccttggaaccttatagaactttatgtggttcaggaaaatgagggcgaggcctcagatcttcaacccatgacagctgtatgcccagctccctgccttcctgtcttacccccagctagggcacaggactgactattgtgcccagagaggtgccagagcctgtaacaaccccagacttcccaggtccagccacatccaccccagagccccaaaagatgatcttcagagagacctttaaaacacaagtagctggtcacttccatccagaccagaacccaagatggctgtgctcttgctgagacatgttggttgtcattgcctccgagcccactttagccctcagctctgtaccagaaatgctgttcctttgggaatcacagccaaagaagagatggagcagttctggaataagaacacaagttcaaactgtcccatatctccccacatcactatctacagttggtctcttcccatggcgatgtccatctgccaccgtggcactggtattgctttgagtgcaggggtctctctttttggcatgttggccctgttactccctgggaactttgagtcttatttggaatgcgtgaagtccctgtgtccggggccagcactgatccacacagctaagtttgcactcatcttccctctcatgtatcatatctggaatggggtctgacacttgatgtgggacctaggaaaaggcctgaagattccccagctataccaatctggagtggttgtcccggttcttactgtactgtcctctgtagggctggcagccatgtgaagaacagaggttcccagcatcatcttcctacacattattacattcacccatctttctgtttctcacttttatctccagcctgggaaaagttctccttatttgtttaaatccttttgtgcttttagatccccttggagcagtagagtaccttgtagaccataagagtggaaaagggtctagttttctccttgtttctaaagatggggtggctgaaaaaactccccttttttgcctacagcttgcctctctgggcctagaagtggttattctgtctccatattggcctttgatttgtgctgagggtcagcttttggctccttcttcctgagacagtggaaacaatgccagctgtgtggcttctgccctgggggctgggggtgaggctttgggtgccactgcctgtgggttgctggcttaaaggacaattctgttcattggtgagagcccaggccattaacacctacgcagtgttattgaaagaagagaggcgggggtggaggggaattagtctatcccagctagagggagataaagagggctagttagttcttggagcagctgctttgaggagaaaatgtatagcttttgacacaacaggaagatccagaaaattatcattgaacatattaaaggttatttctttttcttgcaaaacacacacacacacacacacacacacacacacacgcgaacacacgcagctgatgattctactctcccagccccagccctgaaggggacccagaactccctgcacaaaggctgtccttcaaggggagggtgaaagaagtggaaaatcacattttcattctttagcgtctccatacaacagccagaactgggcagaagctaattatatcagaagcatactccatgttgctgcatcagctttgggatgttcatttttaaatttatttatagcttgtctcattcctcaaaggagttcagggagctacaaaaataaagacaataaaattgaaaaaaattaaattaaaaaaaccatgaccagggaaaatgtgcagtagaatgaagtgtcaattatcacgttttctgactgcaaaatctcccccacggctgatgcaccatcatttactacaacagcccctcttgttggacatttccagtttatttcgtttgggatggtttgttgctgttgctgtggttgtggttttgttttattgaattttgtgttagctgcagctaataccatcttgctgatggctttgcgctgctcttgaatgattactcaggataaatttcctggagacggattataggatcagaaggtctgaacttctgtgtggctctagctacaaagcaccagattgctttccaagagcgttgtagcaatttataatccaacactcagcctattttttggctgggagtcaagccccagaatgtgaaggaggggtcttggcctggagcaggggctgagggatgggtgcacaggacccctccttattggttatttatggggatgggccaggaggagcagaatagaggcccctgccctcccagttgctccttggagtgactgaccccataggggaggggcgaggctacctcacatttagaactatgtagttggtgatggtcaaggtcctaggtctgatgggcatcctcctccctctcctcctcagccagtaatggctgcactatgtcgtatgtcctagatctgggtcccttttgctgtgggaacaccaataatacttacgctgtttcctgccggaaacggtgcaggagggctgtggcatggtagtgggccctggaaaccatctagccttcatgaggaagggcagttaaagcacaggcatgtatgatgttggtattgattaaaagcctcacgggcagagaaattcgccatctgccagggccccagccatacgagggctccagccatacatcctccaggagactgggacctctccaattgcaggagccttgccttccccatcagattaggaattccccgaggatggggacaatgtccttcccacctgcttgagaactcctaaggggcatgtactctgtctccccattgtatctggaacttcctgggagcatagctcctgtctccgtcctcagactgggaatcccctaagggcagaggccatgtccttccacccacttgggattccctgaagttggggaccacatctctgatgtacaatgctttgtatgtactgactgctgcaggattcttggagtaaatgggcagtcaacttcttggactggtattgaccatctggacttcatcagagtgtccaagactttgccattcattagacaggggccatgtgcacaggcagagccctggcctctggcttctggctcctgactcctggtccctctgctttaatttggctaatggcagaaccagactcctttctgggctgccctggaaggggatccttgaatgaaagaggatagatgggaaggtggcagctgacatggttacctcttatgccatgggggggctgctctctctggaaatttaggcctggggtcagggcactgttgagcattttacaccctaggccagaggaggggtgacctgtggagcagggctaagctagtagcccatgaggtatgatgtgtaggcagcacctggggctcacagagcctgttacccatgttatctcctctgaccttggaaagagctggggtgtatgaacaagtatttataagtttacaaaaatcatatgaggaaactgaggcacggggaaggtaaatgacatgccctaggttacacagcttataagtagcagggattctgcccttctgtcacaccaagtcccactgtcttttcttcctggagtccctgtgactgatctaaaggccacatgtttaacagaataaggaggaggcctctgttgcagcaaaccagctaccccacccgcacacagactctaagggacatcctgctttaagctgtccttagttactaatacctcagtgagaatgagtttgaaattttctcaagagccatgggagactaggaagtctctaagcttcatagagagcctggcttggggggacacaggagccaaaggcagaggaagaagtggcagctttgtgcccccagaaacacgtgctcctgacctcacagttggccacagccagccaactctcccatccttctcccaccactttcccgtggggctaacttcaccctgtccacacggagtgacttaacagtttaagccccagagtcgggggccggggtacctgggacaagagtcctgagggaaatggggtgaggaactggaagtgccacagggctagagttctgcccctagcctactggagctgtgccccacaggctggccccactggactgcgctgcctccaagccatcctgggcatctccatgtgtagctgtcacgctcctcccactaaacgcctccctgtgcttcctctgcagttttcatgaacacggccatccccattgcagctgtcctcatagtaagtggatcctttctccatctcttgggggtagggtggagggggagggcgtctgcagtgacaggctgcccagatttggcctttctgcacaggggcctcagaagacaggctccacagccagactgaaaataggatcgaaagtttatagagggtgtggcccctccccaactccagccgaacaggggcctctgcctccaggcctggaagaccggaggcttagtatttagagaaattaaactttcttttaaaaaatagctatccaaatttttaatttttaaagtgaaacatgtgtattgtagaagtgatgggaaatccagaacagaaagctcaaagagaattaaaatcacccataatcccactggtaacatttttaatgtgtttctttccagtctttttttaaggcctatgatatgtcattttctacaaaaataggaatgtgctatgcatgcagttttgcaacctgctcttttaaatttaggaatatgccacacacaattctccatgccactgaatattatgatggtggctttctaaagcaattttgataaaagctgtgtgtgagctgagccatgggggtcaagcagcatgctcctacagaaaggcctgggcccctacgagcctgcagccccctcacccagcctcccatccccatcttctgtgatggctgcagttccttaaaaagatctgcttatttcccccggggccagtgtccctgagctgtgtagagttcacagcctgtcggatacacttgggaattcacttccaatgtgatgtattgagctggttcctggcctggctcctgggggaactgtgggtaacagaggccactgagccagccaggtggctggggcaaagcactgtgcagtttcgtaatcactctgtttacgttatcccgatgaggactggggagatgagcaccccgcctgctgtctgcagagggggccgtgctgacctaacccgagatctcctccctgcttattcccagccaagactgggcaggacagggagtcttggccaggacagggagggagcagcccctgctctccagcttgaagtcctgaacttgttggggacgtttccatgagatgactgtggggatgatgaaggtgtctccaactaaaagatcctcttaggagcctgctccctgacagccctctcatttcccttccagtgctgagcgtttccagtgtgggagggacccacaccctgggccaccctggcctcacttgtgcctctgtccacagactttcgtgggccacgtcagcttcttcaaagaggccgacttctcgccctccgtggcctttgcctccctctccctcttccatatcttggtcacaccgctgttcctgctgtccagtgtggtccgatctaccgtcaaagctctagtgaggtgaggggagggtccgggcgagggcactgggcaggcaggtcctgtgtcagcctcaaggcttgctcgagtgatggccaaaccacagctgtttggtcccggaacacacccccattgctgggccttgctgtagctggtcctggttggtcagagggacattggcctgtatggtttcccagctcgccatccctgagcaaggacttgcttacatacctcccaggagaggggactcactgtcactttcacgacaacttaaaaaaaaaaaaaaaccagtgttgagccaaatgtggaatcctcctaaattctacccactggtcctaacttcaccctccagagccaccaagaatgaggccatcccgtccccacgtggctgccccatggatatcagaaggcatccactgtgtctatctttcccaggccaagtatcccctaccctttccacagcccctgagccctcacagcctcagccagtgaaacagcttcccccaagcgctgggtcctgctctgattggcccacagctcttggaggctcccacttccaggctctagagcctcatggggactctgccactgtcccagaggcattgccctcttgggaatgaaagcctgaaggtagaaggctgaggctttggctgggaaatgccctgtctggagtgagaagatgtccttgggcctctgaagtagctctgcctccttgaaagcaagagcctgtcatgcctctatggagggctggcttgtccttacccatggccagagaaccagtcagtaacaaatgtcctctgtgtcttcagccttgaggaaggtgacacccctgtctcatgggaccctggcaggtactgggaagctggaaggaaggagtagctgttggaatgaagtagctgatagagagggtagcttgcagggggagactctagcatgggttcaaagatggaatggggcataactcagcaaaattatgctctaaggagtatctgaccaggcagtagctggttaaacagggattagctcccatttccacagtcggctgtgctgactcagtttcttgaccagggtgttgtggggtctgaagatcacccctcctcccaccacccactctccagccctatgattctgtgtagaaaccacagatttaagaacgctgcacctgcctgaaaactgttgcactgatcccaaagcgttcatattttcaaacactctggatcccactgtttccaggaatggaacaccagagtagcagaggccttttcagtgaggcagctcaggctctggctgaaggtgggcgcaggacactacctgaagcttcaccccaagagatgagggccagctccactcttcccagtcaccgcctgtgggggagggaggctggacagggcatgaaggcagagcctggtggtctgcccctcccatctaggggtggcgcacagaaagggagactccaggccacagctcacttacaccccagaataaccttgccttgagggtgggatggcttgtctgccccaggcctgttggacatttagcaaaagagaagaaaggggaatacaaacaatcctgagcttcccagaaagctttcacacctccaggatgggagagaatgaactagaagagtgaagcttccagtgcttcctcaggtccacagggaaatctggacaggggagagggtaggaatagccgcctcccccgtgagtaatgacacctcctccagcaggctgttatggggatccgattacataatgctacaaaacagttaacacagtgtctggcatttagtgtatgctcacaaaatactagctattgattctttaccaatcctagtcctaactaaccttaaccctgaccaatccaacaccaaccatccttcagtctaataacccagactaactaacttcaacattaaccctaaaactaaccaatctcacctccaatccagaccccagcctattccagctgactggtcaaccctagcaaaccctggtaacaccaattacctgcccccatgcccactggtctgcccccttcagtgtgggctttgtgggactatacttcaggcctgagatcctgctcagagctctctatcaggctgcgccctctcccctcccctctgcccctggcaggggtgaggggtgtctctgtgcttcccgagcagcgtgcaaaagctaagcgagttcctgtccagtgcagagatccgtgaggagcagtgtgccccccatgagcccacacctcagggcccagccagcaagtaccaggcggtggtgagtgcccggcctccccttgctactcccagcatggtcctctaaggcccaaaacttgggcctgctgtgtcggacttctgccttttttcccaggaagaggggctcccttccctacacagctcccagcccagtgggtcctcacctccaaaccacccccagcccctcagggttgtgaaccgcaagcgtccagcccgggaggattgtcggggcctcaccggcccactgcagagcctggtccccagtgcagatggcgatgctgacaactgctgtgtccaggtgagtcctgctgccccatgcctggccacccagcaccaactcccagagggagctcagcacctggaaagccagaaagctgcatgcttagtcctctgcagaggtcaccctgcctgcctgtacggtccataggagtccagaaaccagggaccaccaagtggggggacccccagccttaggcaagggtcagcatgagaaggccagtctcccactcccctgctctggaagtgatccaggggctggaatcagtgtcttttggctttcatggaggaggggaagccagagactattcactgggaactggctgcctttctgttctctcctgggcggtgggacacgcctaatgaagatcatgggaggctacttcacgtggaccccagatggaatccccacactgtccaacatcaccattcgtatcccccgaggtatggcccagtccacccctccagcatgcccctccccatgtcccactgaataacatagagataaaaagacaaagctgcatttattgagcacctactctctgctcattcttggtgtatgccctgggtatattatagaaggggaaggctacattctagaggcttccgtgtgctgggtgggagtgaagcactaaggacagggtaaaattgccagccttaatgtcaaaccatccattgcagacagtataggtaatgcacaaaaagatcagaagtgggtagccaaggaacgcaagtggaagtgatggggtttctgagaatggacaaaggccctgaggccatgaggcaggaggattttctggcagaggcagccatgagcaaagtatggaggtgggttggaggtgggacccaggatggtgtttcttgggaccacaaggagcctgggctcatactaggagcatgggaaaggagaagcgagtgcttaggaagggtggcggggcaggaaatcagagagggggaaggacctggggagccagaggaggatgttgatttccagaaggaaaggattaaagagggagaggacttgctggggattctaggtaggaagaaagaaaacaggggccccagggttgggtgcatctgtctgtctgtctttctgggtaatggttgttcagactcccccggccccactcacatctgccaccctccctccctgcaggccagctgactatgatcgtggggcaggtgggctgcggcaagtcctcgctccttctagccgcactgggggagatgcagaaggtctcaggggctgtcttctggagcaggtaatacatgtatcctcagggcccagtggaggggaaatctccttttaaccatcctcctcagttgaggatgcacacacatttattggagggcccactctgtgttcagtgaggactcaataaatgctgctaatggatattctcatcatcatcactagtacgtattcacctcttactatgcgcaggttctttgctaagtcctttgcatgcattatttcatttaatttttatgataactaacaaggtccatactgttctcaattctcatttatagaggaaggttaaactatttgtcctaattcacacagctaataagtggcagagctggaattgaaactcagttctgtcagactctgaatcccatggttactcagatgcacggcagtaatttcccagtgtgggaaattgcaacaccaacattggtttccagcttggtcctgagctgcactgacctacacaccataagtgggtgttctgaagatccagatgtaaccaataaatgttggtttctgggcaaagatcactgtcttaattaaagagccagaaccccaggctcagtcaatcacgaatctgttatttatacccacctacttccaagaagcacttgaaactagttgatgaaagattcatgtaaaaatcaaaaccacaatgagataccatctcacacccgttagaatggtgatcgttaaaaagtcaggaaacaacaaatgctggagaggatgtggagaaataggaacgcttttacactgttggtgggagtgtaaattagttcaaccattgtggaagacagtgcggtgattcctcaaggatctagaaccagaaataccatttgacccagcaattccattactgggtatatacccaaaggattataaatcattctactataaagacacatgcagacgtatgtttattgcagcactattcacaatagcaaagacttggaaacaacccaaatgcccatcaatgatagactggataaagaaaatgtggcacatatacaccatggaatactatgcagacataaaaaaggttgagttcgtgtcctttgcagggacatggatgaagctggaaactatcattctcagcaaactcacacaggaacagaaaagcaaataccacatgttctcactcataagtgggagttgaacaatgagaacacatggacacagggaggggaacatcacacactggggcctgtctgggggtggggggcaaggggagggatagcattaggagaaatacttaatgtagatgaagggttgatgggtgcagcaaaccaccatggcatgtgtatacctatgtaacaaacctgcacgttctgcacgtatatcccagaacttgaagtataataaaaaaagatgcatgtaaaataaaaccctttaaaaaggtaagaaaataggaactgagaaatgaagagggtaaaaagatgttcagcaacctgggcagaggacaactacagccatcaacataaaacctggctctgtgccctctggtagccaagggaaaaagggatctctgggctttggagtattcatttaggaataaaagttgcagccaatcagcagaagggcaagctttccctaccaatcatttctaggggaaaattattgaaggtgtcaggtttttcataagcatgagtacagaactgagcagggagaaagactttgggcccaatgtctgaatatcaacatgcacccccgtttcctgcatttccaagatgtccctgaatggtgtatccaaaagatggcaaatttccctcctcagtggggtcgtgggctagcagatgagccccttgggtttcccatcacctcccatcagggactgtgatgtctttgggggcagaggggtctttgcctccattcgccattttatttgggagatttttcaacatagcctgactgggaaggcccaggtattcggtttgagatcatattgccttattccgactgcctctccagcctttggagggaggagcccttttctgctgtccaactgcatgcctgcagcaagaagacaagagtccccagtgcactgtgagctgaagaaagtaaccaatatttattgggtacctcctatgggccatgccctttgctaagtgcattgtcaacatgatctcatcaagcctcctactaagtttaggaggggagtgttgttaccccatttcacagaagcagaaactcaggctcagagaagttgggtgacttactagtcagtgtgtggagcagagactctgcccatgttctttccctcaaacctggtcactgctggggcccccagggcctagtcctaagggttattgtccaagccccatgtagtggtcaggctggatctgggctctcctccaaggcagggcttttccagaaggattgcagggctcagacactggagctgcccctgccttgacctgctcagcatggatgtcaaaacccactctgaacctggtccctttgccctgctttcttctcctcccccaccctcatgccctcatgtggcatcgtgcctgcctcaggagctctccttgtcctatgtagatgaagcaggcatgattggcaggggtctgctctgccctgcctcagtccccacctcttctccaagctgtgccaaccctccgggtctgactgctgcccctctctcttaggaaacctctgccccagcccagggaacacaaggagcctctccaaggcagaggaccctaagcacttcttttttttattattttttattttattttaggttctgagatacatgtgcagagtgtgcaggtttgttacatagctatacatgtgccatggtgctttgctgcacctatcaacctgtcatctttttaagccccacatgtattaggtatttgtcctaatgctctccctcctcttgcctcccaccccccgacaggctcggtatgtgatgttcccctccctgtgtccacgtgttctcattgttcaactcccacttatagtgagcacatgtggtggttggttttctgttcctgcctaagcacttattataggccaggcactgtgcaggcacctcatcatctcagtcagtctgcaccgaactctgtgcagtagatattattatatcctcatttatcagattaggaaactgaggtgaagcaagttgtccaaggccacccagctgttaaatggcagaagtgggatttgcacctaggtgctcaagtgcattggtttgccaccatgtgctcaaagagaaggggcacaagagcctcatgaagaaggcatagctagcctgacagtccaaaggccagcagccgctgtggccatgactcacacacacctgcctcctcccagaactgccacgtgggtcctcacagctctgtccttatcaacacttactctcctttacaggtagcctaggccccagctcccagctctgttcgaggctcgcagaggggcggtagtgaaggggtctcatttctccaggatcctctttgctctctcgcccggtcctggtccagcttccctttcaagcatagtgaagtgcatttgttagcttgcagccaaccctgggaaatcatgagaatttgttcccaagtcaactcattctccagcgtccacagtgacgtattcactcacccagttgagcgcctagtgtatactagaccctgtgacagcaacaggagtgcaaaggtgactaagacgtggcccctgctttttttttttttttttttttttgagacggagtctcgccctgttgcccaggctggagtgcagtggtgcgatctcagctcctcacaagctctgcctcctaggttcaagcgattctcctgcttcagcctcccaagtagctgggactacaggtgtacaccaccatgccggctaattttttgtatttttagtagagacggggtttcactatgttggccagggtaatctcgaactcctgacctcatgatccgcccgcctcagcctcccaaagtgctgggattacaggcatgagccaccacccctggccggccccgcttttaagagaggggagagaagacctgggccttagaagagctcagaggaaccacaattgactctgcagtcaaggagaggaggctcactgcggatgtggtatttgagccttgaaggatgagtgtggtttcatcaagtagaaaaggcagggatgggaaagggaggtggtccaggcaggggtgatggtgtgggcaaagccttgctgatattaaagaacatagttctgtgcacctggaacactggatgcatggggtgcattatgaaagatgggactgaagaagtgaacttggcttagatcccatgtagtaggtctgagaagtaagatttaacccaaaggttgcaaaagaaccatgcttgtgataaaggatgatggattggggaaacagagaaaaagacagacagactgtaggaagggaggtattagcaaataatcataacacagtgtgaggtgtgcattaatattcactcattccaagtattgatcaagaagagaggtaggtactgggttaggaaacagcttgggcaaatgcatggggaaatgagagatgtcaagatgcattctaatggcagcctcttgaagatcttaagttgtttttggttcactcatttcgcaaatgaattcatttagcaaaagcactatggatacagtgcttacctctaggaagtaagttttagcccaaatgctgcagaaggatcatgcttatgacaaaggatgatggactggggagagagaaaaagaaaagacagacagactccaggaaggaaggtcagtctgcagctccttatagtggctaggagaaggagtctaggcagatacgactcaattagcttcatctgctgtttgtctctcaaaatctagacatgtgcactgctctggctggcccacctatcctgggcattgagttaagtgtgggggctgtgtgttgagagtccccctccattactggcaggaactccacacctcagacattgagccccaggtctgcagggagaagacgtgcttgcaaagtgagctaaaagcaaaacagcctctgacctggcaagcattcccaagtctgcacgcctgcagccagaggagagggtgatgccaggctgctgctcagatgcttttcagccatacccaggccaagacctggtgaccaggcagccagaaggagttccaggaggcacaaggcaggaagttgggggattaggaggtgtagaatggagaatgctctggggagatgggtgctttgttggtgcaactattcgtttattcctccagtgaccacgtgagcagtatggctgcacacacaggctctgcagccaagctgcctgggttcacatttggtctctgtgctttggaaaatttcataagctttctctaccagtttcccttattacccatgagattgatgtgaggattaacctagcatgtagtaaatatcctataaatattattattcaatagtgtacttctttgccaggaacaaaattcacctgttcctctttaaatgtcctccagtctgtctcctgggaaagattcttgtgagctccctggggacagggaccatattttgtttgtctcactgtatccgtagtgctttttgctaaacgaattcacttgctaaatgaatgaaccaggaacaacttaagaccttcaagaggctgccattataatgcatcttgacatctctctcctttccacatgcctttgtccgagctgtttcctaacccagtatttcactacccctcttctccatcaatatttggaatgagcaaataccgttagtgcatacctcacatggtattataattatttgctaatgcgtctgtctcctccatgactctgagctccttgagggattattccatgttgtaccccaggtgccccatgcagatgtgtattttgtgcactgttctgtgtaggctacaaaggaaaaggcctagcacctgcccttggggagctcacccacccaggatggacagaggtgtgcagacagagctgcagggtgggcacaaagggtccatctgctgaagtcctgcagatgcagccccgagcttgtccctcacgtcagcagcctggctcctggtctcagagagaactgtgtggttcccaagcattcactttaggaagaatcacttgcccctccctggctctctgcttcaaggaactgtgacaaccttgggatttgcaaactctctctttaatccttaagaggaaaatgttttggtaaaaagtcaagattagcagatacactcgggtgaaattctttccctggaaataaagaatagagccattaatatccacagtagagtgactttaaatgcccccggggggtcagcaggaaccagggccctgaggaaaggatcagcgtggggaagaggctcccacttccctgtgaggagctgcacatgcagtctcactggagctccctgctgcaatgctgttgcctgtggtggttggtgtggatgctgcctgccaagagccctgattccccaggaagagagaaaaaggcttctctcaggacggccctggtcgcatctgcctgtacaattcctggagcctttggggagctgaagtcaggggctcaagtgcccctgggtttcctggaggaggcaggtgtggtgagacagctgacagacaggagaagggatgctctgaggaagtgactgtccagccatgggaaccagatggcccctggctgtagtcctgatgctgccacttgctagctctgtgaccttgagcaggttacttcacctctctgagacagactcactgtctggacaatgagtaaaaccctacctttcctgtctcagagatttggcaatgggacccaatgacatcaattggaaaggatgctgtgggtgaaaggtaacctttcaggacagcgacaagcctgtctgggcaggatgaatgggctgtggagccctgtatatcctagctcactctttgaacctcagtttccacttcttccctttttatttattgccggggtcttaaatgagtgttgggggtatctgattctccctctgcctgtacttttggggccaagcactgagctgaaaagacaattcctcctagttctccaagcctacaacctgccccctaaccagctgtgagctgtaatacattctccagtgtcactgtgaggtttgtgccttcacccccattttatagatcaggaaacagaggctcctccaagtaaaggagcttgcctcagatttcacagccaatgagtggaaaagcctctgggattcaaatgtcagagcccatatttttcctacttctcgcacctgttatcatatgctgcctcttcctttaacctgcagttccctcccttcacctccaccgtctcaatccttcccactctttaaggttcagttcagctatgacttcttctatgaggctctactcattttctcagatttcttcctcctccaaatttcttgtaaaaattatgttttttctctgattctaaaagaatgcacattacattagaaaagatacacaagcatacagaagataaaaaccacctaatatcccatcacccagaagcttccagtttttctttatgcatttgcatatgcatttgtgtttacttttccccaaaagttctccgatactttgtcctacttttcttttgacccttataacttcctgacttcggtacctttctgatttgccctaccagagtgtgagcccctggaaggcagcctctgcaccctgattcaggttgccacacatatgccagctcctagtgggctggagggaaggacatgcggttggggaactggaagactcatgctttcagctgtgtgcttcctccctagagtgcaggcagaggaggaatcgaatcccctcagcactcttgtaaagaccacagcaatgagtgagagatggtgcctgccagacataccattctttacttttcagcttaaaacagatacaaagtttggggaggctcactggaggaggcttggggctacactggaaagagaagaacttggattcacaccccagcttcccctcttcccagctctgtcacatttgcaaactctgagtctcagtatcctcatgtgtaaaatggggatagggtttatagggttgtaaggatgagatgatgagttgtttgcaaacaacttctcacagtgcacagtgaaggtcagcaatgagagccagccccgccctttcttctttccaaatgattaatatatctgttaccagcctccattcattatatagctctgtcatgtgctaagcaccatgggggctgaaaaagatgttcttcctgccttaaaattccactggggatgaacaaattacacgggagctgatcagagaggaaggcagtccattatgagggctaattgagcagtgcagaccatgttgcaaactgagttagggcctggagagcttactgtgtgctggggtcctcaggaatgccacagatgcatcaataaccacctctgctactctggaagtagtcacatcaggaagactccagagataagcttatctgggctgtggccacagagctggaatttgtaagctttaggtttctatgtctcatgttaccagcttgtctataaattgtaaattacagccatctgatggttagggaatatgaagtttggttaagagaatgaaatgagaccacgaagattagagaacaggaaaagaggggactggggactacatacccatcagaatcttcattcagtcctgaccctcagcaggagggggatttcatcaggctcatttccatccttgatttcgtccatcctggttctcctgacaaggggcatttatcagagttatggcatgggaaatcacaggggagtaatgtaccatggcatttaagagtatgaacgttggagtcggagctattttctccgctacttactagctgtgtgactttgggcaagttacttagcctttctctgagcctcactttctttatctgtaaagtgagggcgatcagaataaacctccttcatatggttattttgagctttataaagagacaatactggctgagcacggtggctcactgccagtaatcccagcactttaggaggccaaagctggaggatcgcttgagcccaggagttggagaccagcctgggcaacatagggaatgagactcctgtctctacaaaaaatatacaaaaattagtcaggcatggtggtacgtgcctgtaatcccatctactcaggaggctaaggcaggaggatcgcttgagcccaggaggtggaggttgcagtgagccaagatcacgccattgtactccagcctgggcaacaggagtgaaaccctgtctgagagagagagagagagagaaaatactactatggtgcttataaaagttcaataaattttagctgttgttagtattattaaagtaagatctgtatgaaaataaagcagattttttcccccaaatgttcatgtcagaagtatatatttcattggcaaggggctgcttctggaaggttgagaggtatcctgggggaggggatagagcactggcaaaattggcatcacaattcaagtcacctcactcagtgttttttaagttatcaaaatccacagtatgaaaagcatttgacattacagtccactatatttatgcatttataaacaagagaaaaaatcacgaaaaatacagtaccacgtgcagtacacactgattccatctattctttttttttctttttcctcaaatgcacttgccgcctacttattccagacccaatgattgggtccctatccacagtttggaaaacactataagaaatgattgtgtcctctcactttccctctctgggatttagttttccaactataaaatgctcctgatgcccagccagcctcaccgctgctccgagtcaatgccaggaacgctgatttagcacatgctatttggagggtacccatccaggtgctgtgggagggacagagattgagaagagtgctttctgaccccacagaggccatttggaaaccctgggaatgggtgggagggttggaggtggggattgcttctcccctaagactcagcgtgatggaaaggcaatggggtgggaactaactggtgttggtctgtcccatttgtgtcccagcagccttcctgacagcgagataggagaggaccccaggtacagccttgggactgggtcagaagtgggtctcaacaaagggaaggggtagggtgggggtggaggacttgtgggtgggtaatgctgagtatggattcagggatgtgcagcctacatattttcagagacatggggctaaggcctgcattctcaatgagggcaaaatttggttcttggggacagaaaacacttagacattgcaatgctttgtggctgtccaaagtaccaaacagatgccagtatatctgtggtgctgaaatttcatggtgaatggagtcagaaaatagactagcgattgccagggtctggtgggagagagagggaagggactgccaatgtgtatgggatttgttttggggaagataaaaatgttttggaattagatagtggagatagttgcacaacctggtgaacgtacttttagtttcagaggttttctaaacctctgatttttttttaagtgacaggaaagacagaaaaaagtatatctaaaaaggctctaggggtgatcatggaaaagaaagttaagaaatatgactgtaaggaaaggagatgggtgtccctcaggccaggcagaaaattcagtcttgttgctttatgttcatgtgcaaatctaaaaaatccaagtgatatagattaatgaggctctgagtccctcaaaaccttccctccccttacctctccaaaaaacacttgagataccctagaggtggtatgaagtcaggatgggaaggttggctcagctttgcaaataagtttaagcctctggcctttgctctccaacaccaaagaggcttcactttggtatattttctctgccctttctccctccttgtccccaactgtcagtatgtgatgacaggctcagcctctgtaatggtagtgatcatatttcttgagccaaaaatcagacctcatggcatgtgacaagtttgcatatgtggatgagaacagagtggcagaatatttgacacgggagcagcttgggcagtccagggcacatggcactgcacctgacatccctggcagatcccccacattccgtggttgtcttctgatggggccatatggggctgcagatcatgcctggagccctcgcagctccagggctgcgggttcccagccccagagtgcaggtgctggtgtcagcctgcctggcctggcctggctctgtccagagcactccttgccccagctgtttgtgcagctgtatcagcctcagacctcagcctattcattccaacctgaatgcagaggctgggtctggaggagccacattgcgggcttcatactcctgatctgacaagttttccccccagagcctgcaccaatggcacctctccccattctccctcttaactgggtcctccagggccctcctcacacacccacgtggtcaggcagcagaggcttccccaagatgggcacaccccactctccacacctctctatgcagcatttgtggctacagactgggtccaggggattgtaaaggcatgctcatgttgggttggagggagctcaggatcttcctggaggatatggttcactcccatgagagctcagtatgcctttcctcccctgctgcagcccagagcgggagacagcgaccgacttggatatcaggtactgcgtcctgggaacattgccccccagggtcaactccctccagggtgctctcaggcccaagggagccacatcaccctgctgggcagcccccagaccccagccccagtgttgggggaggccagggagggcccctgtgctccaccaggtggctcgggagctgctgctgtttctgtgcatccatttactcccttcacataagatcatttttatctgggatctctttttcttttttcttcaaaaaccacatcactcaaaatgtggcttccttggctctgcttttaaaaaaaaaaaaaaaagttcttccatttggagaattacctgctgacttcaaagtccagtggcttgagggctacccaaagagggaggaagccagaagttgagtgttcccttggtttggtcacacttttgggctcctccctgactaaggaacaacagactgcagggctggggcaggctgggtgtagggcagggaggggatgaggtcctgctgccccagtcagttgagacccagacctctcaaacctgcctgggggaaggcaaggccaccagaggccacactaagcagatttctaccaactgcacctccccatccccttgcctccatctgagccatcagcttgacaactgcctctgagaacaagcccctgagaatgccttccgcaccccctactcccgccctgctttttccaggaagagaggccccgtggcctatgcttcgcagaaaccatggctgctaaatgccactgtggaggagaacatcatctttgagagtcccttcaacaaacaacggtaaaagcctgtcggagggaggcaggatgtggaggggaggaactgtctctggccagcctgccccagttccgggcccctccatcgatcacccacacccagccatctcactccccaggtgcttacctgcactccagcctctccatatggtgcacctggagaggggccaggtgtgcctgagcattggggcaatccagctcccataggggagagggcaggaatggagggaagggagagagccccgctgccttttctctagctggtgggagggctagctagctctctctgtgagtctccattcgcctggctcctgcactattttccctccaatgataatagttagggctagcatcgactgcgctcttactacataccaggcacagtgccgagctctttgtacacggaatttcctctcatgcttacaacaacctcagtaggtagatattattgttattcccactctacagatgaagaaccaagtttcagaaaggtcccaaggccacccagccagtaagtgaccaagatgggtctcaaatccaaagctgcctaacacctaagtacatgtttgtcaccaacatactctgatgcctccatgaactctggctggcacctgcccaggctaagggctggctggggaagtatgagaggaacaggctgggcaaatatttgaccagccatcatcattactgcctaaaccaaccagcagtggttttccctgcagtgccccaagcacgggttccggctgcagcttttcccactgcacagagatcatgagcgccctttcatcacttactctgcatatttgttcccaaccaattccatccttctagtatttaacctgcccaaacgctgtgtgaagtgctgacctcagctcttttcaagctcacacggtgtttgcttgcacccaagcgggaggcctattaaagccattgctcaccctgggcatagctacccagagactaatgaccctctgcaagtgctcgggccaactctgaccaggctgaccagctgcatcccctgcctctacccacgccaggtacaagatggtcattgaagcctgctctctgcagccagacatcgacatcctgccccatggagaccagacccagattggggaacgggttagtagcagcctctgaggggttttttcaaagccaggacccccaacctaccatgccctgagacactactcaggacaatgggtaactaggaaataggagacattgaaggctgaagagttgcctgcagtaaggtcaaacatgttgttcttgatgatgtcctttgacaggttttcagtcctgcttggagggcaaggtcagcttagtgccctcccaggctggggatcttcttcatttgcaccccaggtatacactgagagcccacacagcactgtgctcagcctggggttgtattgttcctgttcatcctccagatggggtcccctccacaagcttagacgaacaggattctcctgtgactgtcctccttttgtgtgattttaatccctgctgcctctgtctttgtttgtactggtcagatggtccctagcgcctacacaatgaatctttaaagacttggggctcatgctgccctcttctgaatgaattcagtaaacacgtgcaagttccttctctatgcaaggtgagaagcaggcaaagaagtggatagagccaggcctccatcccaaagagctcatagtccagtagggtacaggacagtgtctcctgaatggctgagggcatgatgtgttcctcctctttggtgacagggcatcaacctgtctggtggtcaacgccagcgaatcagtgtggcccgagccctctaccagcacgccaacgttgtcttcttggtgagtgcaagttcccttggggtcctggtctctggctgcctcccaggcctaactgcccacctccacctccccgcaaccccaccatcatccaacaatctccctctccaggagtaaatccctcctgccagagatattgccttatcatcctagtgatagggaaactgaggcaggcaaggatagcacaaatgacccattgcagacttcagatggagctctgcagtagccaatgaggagaggcaagctgtagttataggctgcctgtctgtgggacagcccaacccctcaacacttatgcagcccgactataagaatggctgataacagaatgtgtgctgccacttcccatcttatgcccagtgcagacattgctaattgttcacagcattatttcccatggaacttaactcatcctcagaatccttctcaacacagcactccaggtaaccactagccatcaaacatgagataaaactaggccaggcgcggtggctcacgcctgttattccagcactttgggaggccgaggcaggcggatcacgaggtcgggagatcgagaccatcctggccaacacggtgaaaccccgtctctactaaaaatacaaaaaattagctgggtgcggtggcgggcgcctgtagtcccagctactccggaggctgaggcaggagaatggcgtgaacccgggaggcggagcttgcagcgagccgagatcgcaccactgcactccagcctggggacaaaccgagactttgtctcaaaaaaaaaaaaaaaaaaaagaacgtattcgcaatccttacactacttcatgtcaagttctgttgtgtcaggtgccttgactgacactgaagaattctaagaaccagtccttggcctcaaagatttagaatctgattagggagacagagctcacccagttcaagaggcccagcccggttcaaatccaaactgtgcggcataaactatgagggggccttgtccagggagacaactgtgagggctggagtaatcagggagggcttcctggaggagagcctcaaagggagagtcaattaaacagaaggaaagagggaggccatttgcacagtgagttggaagaaggaagctcaagtctctgattccagctttattccctcccctctccctacaccacacgcacaagcactcctttactaaagacacttcacagtgggaagattcagtctccgttaccgtctgacacacacacagcgttttacaaagcatgggtgcattcgcgatctctcatgagatttaaacaaccctgctagagaaaagtgaagtggacattttatttcagtaaacgtttatgaagcgtctactctgtgccaggcactaaacgtttatgaagcgtctactctgtgccaggcacaggcacaagaagtctcagttcttgggagtgccataatcaggaatggacaaacaatgatcagatctggctttgcgccagtgtcacgggaatagggaggaaggaagggtaggcgtgggggtcaggacaggatgcaggaggaactggtgcttaggtgagcgaaggatgggtgggagttcacaaggcagacaaaaggcagagcagcactccaggcagaggaacagctcaggagaaggcccagacggcaggcttcctgggaacctggaatgcagagtgctgggaaagcacagatgaagcatgagtctagaagggaaagcgagaggttataaagcacctggaacaccagcccacagggtttgactttagagatgatggggagccgttgaaggtccaggagtcaggcagtgaagtgattagatctgtttgagagtgatatctgacaactgccccattttaaatgaggtaaccaaggcccagagaggttgggtgagttgtccaaagccacacagctaactagcttcagtccctagagcagagttgatagaactctaatgggttttatactcattgtcacccctccccaccatgcctttccctaccctctactctcttcctctcccttctgcccaggatgaccccttctcagctctggatatccatctgagtgaccacttaatgcaggccggcatccttgagctgctccgggacgacaagaggacagtggtcttagtgacccacaagctacagtacctgccccatgcagactgggtgagggggaacaagggggtcaggctatagggggcagggctggggaggctgtcaggcatcttggcaggaaccaatccgttgtcttggtagcaactgctgagggccacaaagcataagagaccagcactggatggctttatgcatgctgggcatttcagggagaccctgtacaggccaggggtttggtatcacctagacccacagacactccccatcctggcccgggccccccatggtacactcaaggctggcaccaagaagtctcaggaataatcaagtgctcacttctcaccttctgattcctgcccttttgatgacccatccccgcagtcatggggagtgcccatttggatggaaaagccctcttcccaccctatgaccttcccggggtggatggatgcaccaccccgggaatcatatgggaaatatggaaccaaacaatagcagtagtaatagaaacttcaggctgggcgcaggggctcacacctgtaatcccagcactttgggaggccaggacaagaggatcacttgagcccagaagtttaaggctgctgtgaaccatgatcatgccactgcactccactacagcctgggcgacagagccttgtctctgaaaatttgaaaaaggaaagaaagaaagaaagaaacttcaatattatcagtagagtccaatgttgtgaaacccctcattaactaaatttccatactcttcagtaggtagaaaataattactttttgattcattagaaagcacttaatttttaagatggagatcatgtaattttgaactctaggtcttgcctactcctatataaattctcctctaaacaacagccaaaattgaggccctctttgagcttcaggctggtgccaaatggctctgcttattttccccaaaataaatcttccttccatgtatgatgagaccccctccagtataaagaagacccaaagaaaatcacccaaagaaaaaaggcccaaagataagacccaaagacctaaagatttaaatatatatacagatacagaaggtttgtttctgagtttctgtagtgaccttggcaataccttgtagttcaggacaatcctgaggaacacagaagtgctggcttccttgaggaatcagtgatcaggactctcgagccccttgaaccccagcatagggcgggagggggtgagggcagcaggggtgggtgtctgaattaatgtcaggtctacgtgatggtgtcatcaagtgttccagataaaaagttttattgagccgggcgcggtggctaatgcctgtaatcccagcaccttgggaggccaaggcgggtggattgcttgagcccaggagttcgagaccagcttggggcaacatggtgaaaccctatctctataaaaaaaaaaaaaaaaattagccaggtatggtggcgtgcacctgtggtcccagctactcaggaggctgaggcaggaggatggcttgagccaggaagcagagattgcagtgagctgagatggtgccattgcaccccagcctaggcaacagagtgagaccctgtctcaaaaaaaaaaaaaaaaaaagatttattgattccaaagaggcatggccacacacacttagaccagcaggtgctttgctaagccctgatggaggctgccagacccgccgtcaagaggagctaagggtagtgtacaatgagcccacttagtgtatgacggccgctgccgtgggtggagtccttgtgagtaaccagccagcttgagcaggatgcactaatttgctctgcaaacccagccattgagaaatacgcctcagatgtaccgaactctaggtcctaggagtatgttggttggggtaggttatcaataccagcccacttgcagtggatgagctggtggccatttgtagtgaggaaagggatgtgtcaacctccatcttagactccacaattgagggatgtgaccaccattcctccccagccagcccccaaaccacgtttgttgctgcctttccagatcattgccatgaaggatggcaccatccagagggagggtaccctcaaggacttccagaggtctgaatgccagctctttgagcactggaagaccctcatgaaccgacaggaccaagagctggagaaggtgggtatatccagggatggccaagcagccacccctggatgcaaaggttctgctagaacctgaactcataaaggtcttcctgtccttagtgccccaggaagccccctaaagggcagatgtgggagctgggcatgaactggctcctaccagaggagagacagtacctgtgccaggtgcccagggcagaatcaggtgggcaccttcgccttatcctgaggtagtcagatactatttagttgcaaagtttcagaaaatcaactcaaactggcaaagaaaactaagcaaagaaaacaagagggaattaaggatttattgacccatgaaaccaaaaagtccaggtgtgtcatagctttaagtgtgctggatccaggtagtcagtgtaatcagaaatctgtttctcccatctcttgactctgctcccctcaaattggctcagctcccctcaaattggctccattctcatggtatcagtgagggccaccagcagtcttaggtttacattctcccagctcaacaactctgccagaaaaaaagtgcctctttccccatagttcagcaaaagtcccagggctgagtctcactggtccagtttggtcatgtgcccacccctgaacaaatcactgtggccagcggtgtggaatgtgaggattggcctgtcctgggtcacgtgccactttgggagccagatccacctgaatcacagagactaaaaacaggggaagagtggttccccacagggatatgggggtgctattatctgatgaaggggaaggactaaatcctggcaagatgaatgtgtgtctgtctgcccctccctcaggcagggacaaagtagaaatctgacattggtcatcaccagagtagttaccccttaacttccccttcccccaccaaccatatatcctgaagacattgcccaggccacatctgtcttttaggagactgtcacagagagaaaagccacagagccaccccagggcctatctcgtgccatgtcctcgagggatggccttctgcaggatgaggaagaggaggaaggtacaggcaatgggactgggagtgaaattatggcctgaggtctgatcagccacagagaggctaaggtttggggttctgggtgtggtgcagtagtgtgcctttgattaaatggcttccctctgtgtgcccccgttgtcccctcagtaagtggggataaaatgccctgattcaccctcagagggatggaaatgtgtagccacagagtgggttcttgcggcctgcagaggaggcagctgagagcgaggaggatgacaacctgtcgtccatgctgcaccagcgtgctgagatcccatggcgagcctgcgccaagtacctgtcctccgccggcatcctgctcctgtcgttgctggtcttctcacagctgctcaagcacatggtcctggtggccatcgactactggctggccaagtggaccgacagcgccctgaccctgacccctgcagccaggaactgctccctcagccaggtgtgactggcggcccatggcagaggttgggagtggggatgggggaagggctgagcccatgggcaccctggaactccaaatcactctctgcctgtgaaggagtgcaccctcgaccagactgtctatgccatggtgttcacggtgctctgcagcctgggcattgtgctgtgcctcgtcacgtctgtcactgtggagtggacagggctgaaggtggccaagagactgcaccgcagcctgctaaaccggatcatcctagcccccatgaggtacccgtctcccctggccaggctgggactgtgagcaagtcactgttctctgagccttagtcttcccatctataaaatggggatatacaacctgtcacaagcttgtgggggtgactcaaggagacagtgtgtgtaaaagtgccctccttgtgcaagaagcagggagaaactggcatttactcagccagatactgtgataggcattgtgtgtggttagctcatttaattgttaccatggccctttaaagtgagcgtctgcacatccaagtaaagattgttttctcctccctaagtgggtgtaatttgcccatccccacccatgagttcagctccctgccctcccctcactctctctccctcagccagcctcaggttttgacactgggggaacaggtagctgttctattaataatttcctgtaatgggatggataaaaatctcaaaggccacttgatgtcaaagaggtttaaagttgtccctgcccaattggttggccaacttggcttaaaaacacaacaggcaaacagattttctggccccttgtcgaggctagacctcacaatctaactgcactttttactttccagcctcatgagttttctgtggcccacagatatggcctccaagtttatttacttttactctctatttgccccagctctgtagttctgaaactccctggttggggttgggctgactctgggtcagccagccggcaggctgtccccagggccctgttcctcttggcaggttgtccctctggagaggactctgtgtcccaggaggacagctgctgagtcaggccgagccggcagctgagaaaggcggcagtcgtcagatgggcttgagaaactgaaaggctaacgaaaggccagcgcccctttgggcagctgcaggaattcacggggatacaggccagatgtctacaaattggcagaggatgccagacccatgaatgactccagagacacttacatgaaataattaactatctcattcagtaaacaggaagtaaatcaatggacaaatgagtaactcttcctctggctgcctcttaggttttttgagaccacgccccttgggagcatcctgaacagattttcatctgactgtaacaccatcgaccaggtacagaggaccgtgccacactatccccccttccagagacacctcggacccctgggggcttctcctgtctgaggctgggttccccagatcaggtgatcacagccctctgggaagaagccagtgtccccgatccgattataatgctgcttcagggctggggcctccctcgtgggagcctcacagtaaggctgagggaaaccagatccctttagcttccacctgagatcccactggctttctctagtaaagttccagcatattctgaaccaaggtggctgattgtatggagaatattcattttgattcagcctgtgttctttatttaccattgtaccagatggtgtgaaaacaaaatcttgattcctacctcagggagtttaccttgtagctggagagatgagatacgtgcctataataaagggagagcaaggccgggctcagtggctcactcctgtaaccccagcactttgggaggcggaggcaggcggatcacttgaggccaggtgttcaagaccagcctgatggccaacatgatgaaaccccttctctattaaaaatacaaaaattagccaggtgtggtggcaggtgcctgtaatcccaactacttgggaagctgaggcaggagaatcatttgaacccaaggggcagaggctgccgtgaaccgagattacgctgctgcactcaagtctgggcaacagtgagactcagtctcaaaaaaataaaggatcaaaaaataaagtgagagcaaaacatggcggccagtagcactctaaacacagtcaataccaaaattcacctcactctctccccctcgtctccctcagcacatcccatccacgctggagtgcctgagccgctccaccctgctctgtgtctcagccctggccgtcatctcctatgtcacacctgtgttcctcgtggccctcttgcccctggccatcgtgtgctacttcatccagaagtacttccgggtggcgtccaggtgatggcctcaggggtgaggggtgggaggtgctttgcaatgtgcagtttggtgtacttgctagactcatcgttatgagagtaatagggtcgtgttccctccaaaaaataaaaacaaaaaacagaaatgaaggaaatagaaatatccacatcttattccaccgccctaatataatagtctgccaacacacgcacacactgaggttgacatctgaattatttccttgggcgatatggtcaggactggaattgctaggtcatgataaatgcacattttatgcccttcattcattttgccaacatgcttcccaggagggttgcatcattctagtggtcaggctgattgctgatgcatgaaatcggcgggcacctgattcaagcagtgttatgataacacctcccagcccacgtgagtccagagtgtagctgtaagccttgacttgagggagcctctcacagccattctcatggatcacatttgccctcatgagctttggatccatgcacgcctctttcctcctcaaaattttctaagaatgttctctagggagttctttctgggagtgattctcccagattcatagaaactcatagattcaaaaaattgtaggaaaaaatttaaagaacgtctaggccagtgtttctcaaactgccaattacagcccatcagtgggtcatgaaatcaatatcatggatcacaaccagcatttttttaaaaatgaaaaaaacatcagactgtattcatagagtaaagcaagctttgcttcatgaaacctttgtgttggtcatggaggtgtgtgagtactgatttgtgagataaaatatatttctgactgcaggttgtggtcagaaaggttaagtacctttcccaagtgcacatagttggctagaaactagagttgagatacttattagcaataataaaatttagatgcattttggacacaattacctgccccaaaggatcaacatttgtataaatggctttttgcttggatgatccagaatggcccgacacccacacgaacaacatagctttttgacactcaaaaaattcaaagtgctgcacaagctgttctacaaagttcatttcttctgccagagaaacagcccagtctctgtggcacccagtctgaccctggagatggtttatcagggaaatcaacttcctgcatcccaaactggcctccctggcactgatgtgcttgtcgaggtgcagctttggggagcaggaggcaattctgttgccatggaaacctctggccttaccccgagacgaaacctatcatttcagcacatcactggccagggtctaaagagctccttgatggggtaagcggaagacggggttgaacgctttgagtttggtcttctgttcctttggccagctgtctcaaggttcagattgttcacctgtaaaatggaactagcactgcctgcccagccttagctcagctccaggctgtgcagcagaagtacagggacagatggcgacctggggttgacaatgcccaggacagcagtaattgtgccccacatcaggctgtgtctaagcattgtacataaacgatctcattcagtgctcacaaaagctcaatgggctggtggcattgtcttcccccttcacggggtaagaagctgaggcctagagaggtaaggccattcacccacacagcggtagcaggtggagctaggcttcaggcccaggccgagccctgagcctgccctcttaactgttccactctgttccccgccacagggacctgcagcagctggatgacaccacccagcttccacttctctcacactttgccgaaaccgtagaaggactcaccaccatccgggccttcaggtacgagtccacattcccccaaggtaggagtggaacaggggtggggccagggggcacaggccatgagatttgattctcaggactccacttgggaaggccaaggacacgttctctctcaagctgcctcaggtcccaaggcccaagggatatccaccagcagggacaggccaggtgggctcccactgaatgttctagagaggaaaattccagctctgtagacaagcccaggacctctgtgaggcagagcatgaaaagagacaaagctgggacaagtcttcatgtatcaacgctagaaagggccttaggtgcgggccaccctaagcccttcttttattaaggagcccctgtgtgccaaacactatgctgagtactgtacaggccaatcccactcattctgcactgcaaccctcggtgctgagaatggtcatttccattgcacagacaaggaaactgaggcacagagacgttctataacctctctgtgtaaggtgccacaaagcccagacttgaacctatttgttcatgcaacaaacatttactaagccccgactatgtgctaagccccatgccaggcactaaaaagatgagtcaaataagccgctgccctgcaggcgtttacagcccagactttgagcaggccaggataaatccacgtgacaagtattctgaaaaaagcggattcaagggctgtgggagcatagaagagagacagtccgggaaggtttttgtaccagaggtgtcatcagaactaggactcaaaggaggggcaggagttcaccaggctgaggaattcctgaaaacttcagtgcccctgccatcgtctcactaccctgagtggtgatgttggggtggacaggagcatctgaggttgcctggggaatgagggaagctgttgtttcccactccccaagagtctgtctgatctccagaggcatctctcttccagtcaggcaggccagagacccctgacacacaaagttgggctcttttctcatcttcatccagagagtgataataggttatttttagggtggcacagctgcacgaagtatgacagtaaccatgagacaccaagcactgtgtccaggagtaaccatagggcacaaggaccagccaagggccagagaggcttacatctcctccccccaacccctgaagtccagcttcagccctggagaggtatccaggcccctctgcccaccctggagcacctagggccagtggaaatccacctcttagggatcttgtctaagtaaagaagagcagagcaaagctctgccctggccttggcgctgctccctggacatcccttgcccctggacaagcctatgctgtgtcttccacaaagaagcttgctggggactggattatgactctagagtctcctcccagcctcctcttctcaagcctgaacttctcccgttccttcaacttccaggtccctcgacattactgagcctagcctttgctctaagttttggtgatttccctctctcaattggtgtctcagagggccctggggtagagagatggtgactcttctagagtgggccacagccccttgtgtgcagatcccagcttcctgtaaacagcctcagatcaggccaaacctgtggtcagccagagccactgctacccagtgaggtcttccacaccctactgacacggtgaatgatttttaaatttgaatgaaaggctttttaatcaaccccatacacatttaatgcattggctttaatccagcagcctgttgagagctattagcacttattgattgcccacttactgtatgccaggcaccgtgctaagtgttgtatgtgcattattacatttaatcctcacaaggaccacataacataggtacgaatcgccacattctccagatgcagaagcgagacccagagaggctgggtaatcaatccaaggtcacacagactgcgggggctggcgctgagcttggaacccaggtttgcctgaccttctgggctttcctaagagatcttattttttcccaaaagagtttcaagagtgcccagcactgggctcagtggcgggctcggaggttgttttcgttcatgtaggaactatcacttccccatttttttcataagaaaactgagtctcagtcctgatacacagccaggaagttgtgatgttcaggctccaacctgggtttacatggctccgaggctggggctcttttctagtcctcagacacactgtcgcacgcctgtggcagaagctcccatctcacacttgccgaccctcaactcacacagtcctgagacccacatacgctgagcgcctcacactcctataacacgcacatgccctgatgcacacacattttcaacacgcacttactctacccttcaggcatggtttcacactcactgcagacacgtcaccctcccacacgtctccaccctgggggtgtgcagtagcatgctctctcccacctcagaacctcccttcagtcccctcagacacatgccctctctccacgcagagacaatcaaagctgaactaacaccttccagggtgaaaagcaaatgcccagtaaggtacgtcttgggtgcctccgtgtcccctgagtttggtcctatcaaaccagcgatgatgaggcagcttttctttcgttccttcctccatcatcaaacaagtgctcctgcatctcctctgggccgggcctacgtcagcaaggtctgagggaagcggccaaggagagtgatgacggcagcccaggttgatcagagaaaggaggcaggtccatgcgcagtaactcagggaaaacatgatgaggacctaaggatgagaaagaagcctccagagttccctgtgcagagagattccatcaatttcagagggtcaggggagtgccatgcattcatccaacaaatatttattgatagtgccaggtgctggggtatattggtgaataaaacatcttcatggaatttgcagtctattgagggagatgattataaatagctagagaaatgcatgtacagcagatactgtggagcaaacaggttgcagacaataataggggaaacctactttatagtaaggtagtagccaggaagagcctctctgaggaggcagcatttaaggcaagccctgaaggttgagttgagccagccttatgaagagcaagggcaaaagccttccaggaaaagggaatagtgtgtgcaaaggccctggggtagggaagactttagtattgtcacagagcttttaaaaagctgagtggctgcagcatagtgtgtggggtgtttgtggcaggaattaggttggcaggagggggttcttcatcctataagcagtggaaggtcattaatattcttttttatttgtttttttttttttttttttttttttttttgaggcagagtctcactttgtcacccaggctggagtgcagtgaggtgatcttggctcactgcaacctccacctcccgggttcaagcaattatcctggcttcctcagcctcccaagtagctgggattacaggtgtgcaccaccatgcccagctactaatttttgtattattagtagagacagaattccaccatgttggccaggctggtcttgaactcttgacctcaggtgatccgcccgcctcagcctcccaaagtgctgggattacaggggtgagtcaccgcatccggccggagatcattaatattctaaacagtgggggagaggacacagtttgcgatttagatagattaagccagccactgtgtggagcatggactgtagggagacagcaggtagacgtattcaggaagctgatgcagtagtccaggtgagagtttgtggtgggcaggaagcaggatagagggggagggaggcaaggactcttttagagagagacataagaggacttgccaaggggctgaatgtgaatccaggtgattcctgggtgagaaactgggtaaagggaggtgccccttattataatgggaaagacctagagaaaatggatcttggggtgaaaacaagagtttggaggaggtggggattctggacaggtttgaataagcagaaaggagtggggtggacattccagagagggatagcttacatgaagtggccacggtggcatgtctggggactggaggggccctggagcctccctctgcaggtagggagactcctaggagctatgtggaccaacactgttcccttaggagcttctcatcctccctccaggtatgaggcccggttccagcagaagcttctcgaatacacagactccaacaacattgcttccctcttcctcacagctgccaacagatggctggaagtccgaatggcaagtgctattcccctctaccctggcctctgataggagggtggggccagagcaagagcacacaggtacctggggatgaaagagaggataggataccagatcgtgtggacaccaagccttcctgcttcccccagccctggtggtcctcctagtgtctagcctgtgctccttttccccatatcactgcctggaggcttgtgtatctgaggtgtgtgccagtggcaagaacagttgtggtgaatgtgtatctgcagtgggtcatatgacacccacattgtgtgtgtttgtgggccagctgaggcgtgcatgttaaagggtgtgcaggggctagggggtaggggagcatgagcttgtgggacatgttggctcctggggctccagccttcgcagcccttgtgtgtgtctggtgacgtgtgcatgagttgcagggctggagtggaggcctggctgagctgctctctgccccgaaaaggagtgaggtagaacaggggcctgtggctctaacccctgagcgcccaggtcagctcctctccctccccaggagtacatcggtgcatgtgtggtgctcatcgcagcggtgacctccatctccaactccctgcacagggagctctctgctggcctggtgggcctgggccttacctacgccctaatggtgagcggcagtgggctagggcagaggaggggtcagacaccagcactcccggagcaccttcgtcactggagacatgagacactcccaggccttaccccaatttcatttgcatctgatgccagagggacagtgcgggcaggaaggctgaccagcaggccccagggcccaggccccagacaggtggaggttggggagccacatgactgaccctccctgtgcctccagggagggctgctctgagcaggcagtggatggcagcaaaaggaatctggggccctggcccctctccagccttaagaagagccattctggtggctgaggacagaactaagcgaccatggagtgtgcgccactggcttgctccccacaggtctccaactacctcaactggatggtgaggaacctggcagacatggagctccagctgggggctgtgaagcgcatccatgggctcctgaaaaccgaggcagagagctacgaggggctcctgggtgagaggctcagggagaggggtggggaagagtccaaggaggagtgtgtctgggttgggggccacaagggagcctggggatggggtggcactttcggatactagctgtggcccatgcctggtggctgagcccagcccggcccccagcaccatcgctgatcccaaagaactggccagaccaagggaagatccagatccagaacctgagcgtgcgctacgacagctccctgaagccggtgctgaagcacgtcaatgccctcatcgcccctggacagaaggtcagagcacgggcccaacccaatgctgcaggacaggcgtgagcaggggatggggcatgcacggagctggatggcttcgcagtcacctcgtggccctccagggccgaggcctctcactattcagacatcgcagtctcctgccctgggcctgtgggggcccatctttcctctccttctattgccttcccccagtgctgccctcaggccttgtcttctcactcatccaccaaggagaccgacactctggactcccccagctcacacgggctttgtcagggcctccctctctgcgaatggtcaggggctttccctagggcactgccccgagcttcagggcagggacctgggggcagacagcgaggccacccttgtattgagggtgagcccctgcctatggccctggcccagctctcctctcgtttcccactctgtctctttgtctctgtctcactttgctgtggctgtccatgtcattctctgaccttgggatgtacctctgtccctgcctctctcatccttctatgtcactatctgtctccgtattgtaatttctgttggtacccaagtgccaggaagcaacgggatcagaggtggctccattgtagggcggggcacacagacacatccatgcataccactctcagctgcccctgtgtcctcctgccacacccatgcccatagagacacaccactgccccccagctctccttcagccaagtacccggcacacccagacccacaccaaggcccaggcaaatggacatccatgcctgcacttgcgtgccggtccctgtgtaagccctctctggacccactgcaggaaacaagcccaaacctgtggtgtccaaagagaaactagtcagaaaaccaggccaaaaagataccctgtgacctcccacacctgcacacacacccagagctagcatagaggctattcccagcagccccagagtcccagtggcggtgcctgcttctctctttccagatcgggatctgcggccgcaccggcagtgggaagtcctccttctctcttgccttcttccgcatggtggacacgttcgaaggtgagttgtaaggcgggcaccccacgtgtacccacagccaccagatgaggcctcagccctggcacgtggtcagacatgacaggaggcccagcagtcaccgccttcccctgcaccctcactgggacccatgcagggcacatcatcattgatggcattgacatcgccaaactgccgctgcacaccctgcgctcacgcctctccatcatcctgcaggaccccgtcctcttcagcggcaccatccggtgagccccaccacccctcaggcccacccagccccaggccggctcagttccatcagatctggagcacaaagaggagggggttgggggagaccaggatcccagaggtgtttcctgctcatgcccttctccatcccatcaggcccaggcagcctctggaaggggatcccccacccatgggtctaagatgctgtcccccacccactgccaccacctcggtgcttctcccagccagacctccaactcagtctgctctcgctcactgccctctttgccgcctggggatgcaggcaggaccctgctccctccctactggggctttctgtgccacttccagatttaacctggaccctgagaggaagtgctcagatagcacactgtgggaggccctggaaatcgcccagctgaagctggtggtgaaggcactgccaggaggcctcggtaactactcctggctatgcagctgggttggttgggcactcaaggaccctgtaaggatggcagacagaagcccgtgtctcaggtttgccccaagtttggagtctgaagcctggcaggaccatttagtcctacttctcactatacgggggcccagagaggtcaggtgtcttgccccaggtcacacaactggtcagttcagggtctggctcctcctgcagggtacagcgggtacagtcagggatccttgtgagacagagattgcgagtcccccatgccaagggggcatcttcagccctgccctgccccatccacctgcatgcccagttctgccttaggggaggagaagatggactgggcaatcatagacacgggtcactcatcaaggccaccggtgattggcaaagccttggtatatttgctgcagctcctggagcattgggggtggccaagccttggtttcaatgaatcaccctaccaaggccctacatacacactcagtgcacccctcagtgcacacgccccctcccagaactgcccagggccacagcagcacacacctccaggggtgcccttctcgttgcagtccttgcagacggcctccacattgttgtgtcaggtgcaccagccctgcacacgcctgtgctcttggacacacacccacctatttgcccccatgcacacattttccaacagccccccaagccatcccatctgctccactcacagcacaagattaactcagtcctacttcatctccccgggctgttttcagatgccatcatcacagaaggcggggagaatttcagccagggacagaggcagctgttctgcctggcccgggccttcgtgaggaagaccagcatcttcatcatggacgaggccacggcttccattgacatggccacggttggtcctgggcccctccatgggaccatggtcttggaaagggtttagtgggatgctagggagaaatttgcacgaagtagtcctgaggctcaagttgcctctaacatcaaatgctatgtgttgcagaaaatgaaaagagctggggggaccctgactctgtctagtcttagggaatgttacacacacacacgcacacacaaaaacactatgcaaacacacacataagctgcacacacagacccacacagacttcacactgtcacctatcacaacagcacacacacagccacaaccacaacctacatacacacacagagctgagctcccaacaggctgagtccagtccctgagtgccgggaacctgttcagtcctgtggggtgggggtgggactaggatcggggtcagatgggagctgagccacagacctgggctccacatcccccaagccaggccagaccccatccactgggcaggtgagccaacagctgttgcccccacttggcaggaaaacatcctccaaaaggtggtgatgacagccttcgcagaccgcactgtggtcaccatcgcggtaaggggcccattgatggggtgcagagggacacccagggacaggactggcctgttgtggccgtcatcagtgcacagcccctgggcttgcctggtcccagtaatcaagaaagaaccctgaagcaggcagttcagggcaaggggcctggagggcatgcagggagcctgggttgcaggatttggggtggggggttttgcccctgtgcttccctcagacctcccctctccttctccaggttccaaggcctgcccctgtcccaaggccttatatgttaggctggcgttacttctccataggaagtgggggaggggttgtggagggtctctgagccttgaagcctggaggtggggtagagttgggacttggagaggagagaagggtggtattagcagatggagagcttgtagtcacatccaccccaggaaagtgcagtccccacagtgacaggacattctggccacatgcctcatcctcctcctccaagccgcaggagggccaccctcagctgtggcccccaccgcgggtggtattcccaccatcctgacccgccccctcctgccctgcccagcatcgagtgcacaccatcctgagtgcagacctggtgatcgtcctgaagcggggtgccatccttgagttcgataagccagagaagctgctcagccggaaggacagcgtcttcgcctccttcgtccgtgcagacaagtgacctgccagagcccaagtgccatcccacattcggaccctgcccatacccctgcctgggttttctaactgtaaatcacttgtaaataaat

SEQ ID NO: 15311 - DNA, 35671 bp, Homo sapiens
ggtggtgagtgcccggcctccccttgctactcccagcatggtcctctaaggcccaaaacttgggcctgctgtgtcggacttctgccttttttcccaggaagaggggctcccttccctacacagctcccagcccagtgggtcctcacctccaaaccacccccagcccctcagggttgtgaaccgcaagcgtccagcccgggaggattgtcggggcctcaccggcccactgcagagcctggtccccagtgcagatggcgatgctgacaactgctgtgtccaggtgagtcctgctgccccatgcctggccacccagcaccaactcccagagggagctcagcacctggaaagccagaaagctgcatgcttagtcctctgcagaggtcaccctgcctgcctgtacggtccataggagtccagaaaccagggaccaccaagtggggggacccccagccttaggcaagggtcagcatgagaaggccagtctcccactcccctgctctggaagtgatccaggggctggaatcagtgtcttttggctttcatggaggaggggaagccagagactattcactgggaactggctgcctttctgttctctcctgggcggtgggacacgcctaatgaagatcatgggaggctacttcacgtggaccccagatggaatccccacactgtccaacatcaccattcgtatcccccgaggtatggcccagtccacccctccagcatgcccctccccatgtcccactgaataacatagagataaaaagacaaagctgcatttattgagcacctactctctgctcattcttggtgtatgccctgggtatattatagaaggggaaggctacattctagaggcttccgtgtgctgggtgggagtgaagcactaaggacagggtaaaattgccagccttaatgtcaaaccatccattgcagacagtataggtaatgcacaaaaagatcagaagtgggtagccaaggaacgcaagtggaagtgatggggtttctgagaatggacaaaggccctgaggccatgaggcaggaggattttctggcagaggcagccatgagcaaagtatggaggtgggttggaggtgggacccaggatggtgtttcttgggaccacaaggagcctgggctcatactaggagcatgggaaaggagaagcgagtgcttaggaagggtggcggggcaggaaatcagagagggggaaggacctggggagccagaggaggatgttgatttccagaaggaaaggattaaagagggagaggacttgctggggattctaggtaggaagaaagaaaacaggggccccagggttgggtgcatctgtctgtctgtctttctgggtaatggttgttcagactcccccggccccactcacatctgccaccctccctccctgcaggccagctgactatgatcgtggggcaggtgggctgcggcaagtcctcgctccttctagccgcactgggggagatgcagaaggtctcaggggctgtcttctggagcaggtaatacatgtatcctcagggcccagtggaggggaaatctccttttaaccatcctcctcagttgaggatgcacacacatttattggagggcccactctgtgttcagtgaggactcaataaatgctgctaatggatattctcatcatcatcactagtacgtattcacctcttactatgcgcaggttctttgctaagtcctttgcatgcattatttcatttaatttttatgataactaacaaggtccatactgttctcaattctcatttatagaggaaggttaaactatttgtcctaattcacacagctaataagtggcagagctggaattgaaactcagttctgtcagactctgaatcccatggttactcagatgcacggcagtaatttcccagtgtgggaaattgcaacaccaacattggtttccagcttggtcctgagctgcactgacctacacaccataagtgggtgttctgaagatccagatgtaaccaataaatgttggtttctgggcaaagatcactgtcttaattaaagagccagaaccccaggctcagtcaatcacgaatctgttatttatacccacctacttccaagaagcacttgaaactagttgatgaaagattcatgtaaaaatcaaaaccacaatgagataccatctcacacccgttagaatggtgatcgttaaaaagtcaggaaacaacaaatgctggagaggatgtggagaaataggaacgcttttacactgttggtgggagtgtaaattagttcaaccattgtggaagacagtgcggtgattcctcaaggatctagaaccagaaataccatttgacccagcaattccattactgggtatatacccaaaggattataaatcattctactataaagacacatgcagacgtatgtttattgcagcactattcacaatagcaaagacttggaaacaacccaaatgcccatcaatgatagactggataaagaaaatgtggcacatatacaccatggaatactatgcagacataaaaaaggttgagttcgtgtcctttgcagggacatggatgaagctggaaactatcattctcagcaaactcacacaggaacagaaaagcaaataccacatgttctcactcataagtgggagttgaacaatgagaacacatggacacagggaggggaacatcacacactggggcctgtctgggggtggggggcaaggggagggatagcattaggagaaatacttaatgtagatgaagggttgatgggtgcagcaaaccaccatggcatgtgtatacctatgtaacaaacctgcacgttctgcacgtatatcccagaacttgaagtataataaaaaaagatgcatgtaaaataaaaccctttaaaaaggtaagaaaataggaactgagaaatgaagagggtaaaaagatgttcagcaacctgggcagaggacaactacagccatcaacataaaacctggctctgtgccctctggtagccaagggaaaaagggatctctgggctttggagtattcatttaggaataaaagttgcagccaatcagcagaagggcaagctttccctaccaatcatttctaggggaaaattattgaaggtgtcaggtttttcataagcatgagtacagaactgagcagggagaaagactttgggcccaatgtctgaatatcaacatgcacccccgtttcctgcatttccaagatgtccctgaatggtgtatccaaaagatggcaaatttccctcctcagtggggtcgtgggctagcagatgagccccttgggtttcccatcacctcccatcagggactgtgatgtctttgggggcagaggggtctttgcctccattcgccattttatttgggagatttttcaacatagcctgactgggaaggcccaggtattcggtttgagatcatattgccttattccgactgcctctccagcctttggagggaggagcccttttctgctgtccaactgcatgcctgcagcaagaagacaagagtccccagtgcactgtgagctgaagaaagtaaccaatatttattgggtacctcctatgggccatgccctttgctaagtgcattgtcaacatgatctcatcaagcctcctactaagtttaggaggggagtgttgttaccccatttcacagaagcagaaactcaggctcagagaagttgggtgacttactagtcagtgtgtggagcagagactctgcccatgttctttccctcaaacctggtcactgctggggcccccagggcctagtcctaagggttattgtccaagccccatgtagtggtcaggctggatctgggctctcctccaaggcagggcttttccagaaggattgcagggctcagacactggagctgcccctgccttgacctgctcagcatggatgtcaaaacccactctgaacctggtccctttgccctgctttcttctcctcccccaccctcatgccctcatgtggcatcgtgcctgcctcaggagctctccttgtcctatgtagatgaagcaggcatgattggcaggggtctgctctgccctgcctcagtccccacctcttctccaagctgtgccaaccctccgggtctgactgctgcccctctctcttaggaaacctctgccccagcccagggaacacaaggagcctctccaaggcagaggaccctaagcacttcttttttttattattttttattttattttaggttctgagatacatgtgcagagtgtgcaggtttgttacatagctatacatgtgccatggtgctttgctgcacctatcaacctgtcatctttttaagccccacatgtattaggtatttgtcctaatgctctccctcctcttgcctcccaccccccgacaggctcggtatgtgatgttcccctccctgtgtccacgtgttctcattgttcaactcccacttatagtgagcacatgtggtggttggttttctgttcctgcctaagcacttattataggccaggcactgtgcaggcacctcatcatctcagtcagtctgcaccgaactctgtgcagtagatattattatatcctcatttatcagattaggaaactgaggtgaagcaagttgtccaaggccacccagctgttaaatggcagaagtgggatttgcacctaggtgctcaagtgcattggtttgccaccatgtgctcaaagagaaggggcacaagagcctcatgaagaaggcatagctagcctgacagtccaaaggccagcagccgctgtggccatgactcacacacacctgcctcctcccagaactgccacgtgggtcctcacagctctgtccttatcaacacttactctcctttacaggtagcctaggccccagctcccagctctgttcgaggctcgcagaggggcggtagtgaaggggtctcatttctccaggatcctctttgctctctcgcccggtcctggtccagcttccctttcaagcatagtgaagtgcatttgttagcttgcagccaaccctgggaaatcatgagaatttgttcccaagtcaactcattctccagcgtccacagtgacgtattcactcacccagttgagcgcctagtgtatactagaccctgtgacagcaacaggagtgcaaaggtgactaagacgtggcccctgctttttttttttttttttttttttgagacggagtctcgccctgttgcccaggctggagtgcagtggtgcgatctcagctcctcacaagctctgcctcctaggttcaagcgattctcctgcttcagcctcccaagtagctgggactacaggtgtacaccaccatgccggctaattttttgtatttttagtagagacggggtttcactatgttggccagggtaatctcgaactcctgacctcatgatccgcccgcctcagcctcccaaagtgctgggattacaggcatgagccaccacccctggccggccccgcttttaagagaggggagagaagacctgggccttagaagagctcagaggaaccacaattgactctgcagtcaaggagaggaggctcactgcggatgtggtatttgagccttgaaggatgagtgtggtttcatcaagtagaaaaggcagggatgggaaagggaggtggtccaggcaggggtgatggtgtgggcaaagccttgctgatattaaagaacatagttctgtgcacctggaacactggatgcatggggtgcattatgaaagatgggactgaagaagtgaacttggcttagatcccatgtagtaggtctgagaagtaagatttaacccaaaggttgcaaaagaaccatgcttgtgataaaggatgatggattggggaaacagagaaaaagacagacagactgtaggaagggaggtattagcaaataatcataacacagtgtgaggtgtgcattaatattcactcattccaagtattgatcaagaagagaggtaggtactgggttaggaaacagcttgggcaaatgcatggggaaatgagagatgtcaagatgcattctaatggcagcctcttgaagatcttaagttgtttttggttcactcatttcgcaaatgaattcatttagcaaaagcactatggatacagtgcttacctctaggaagtaagttttagcccaaatgctgcagaaggatcatgcttatgacaaaggatgatggactggggagagagaaaaagaaaagacagacagactccaggaaggaaggtcagtctgcagctccttatagtggctaggagaaggagtctaggcagatacgactcaattagcttcatctgctgtttgtctctcaaaatctagacatgtgcactgctctggctggcccacctatcctgggcattgagttaagtgtgggggctgtgtgttgagagtccccctccattactggcaggaactccacacctcagacattgagccccaggtctgcagggagaagacgtgcttgcaaagtgagctaaaagcaaaacagcctctgacctggcaagcattcccaagtctgcacgcctgcagccagaggagagggtgatgccaggctgctgctcagatgcttttcagccatacccaggccaagacctggtgaccaggcagccagaaggagttccaggaggcacaaggcaggaagttgggggattaggaggtgtagaatggagaatgctctggggagatgggtgctttgttggtgcaactattcgtttattcctccagtgaccacgtgagcagtatggctgcacacacaggctctgcagccaagctgcctgggttcacatttggtctctgtgctttggaaaatttcataagctttctctaccagtttcccttattacccatgagattgatgtgaggattaacctagcatgtagtaaatatcctataaatattattattcaatagtgtacttctttgccaggaacaaaattcacctgttcctctttaaatgtcctccagtctgtctcctgggaaagattcttgtgagctccctggggacagggaccatattttgtttgtctcactgtatccgtagtgctttttgctaaacgaattcacttgctaaatgaatgaaccaggaacaacttaagaccttcaagaggctgccattataatgcatcttgacatctctctcctttccacatgcctttgtccgagctgtttcctaacccagtatttcactacccctcttctccatcaatatttggaatgagcaaataccgttagtgcatacctcacatggtattataattatttgctaatgcgtctgtctcctccatgactctgagctccttgagggattattccatgttgtaccccaggtgccccatgcagatgtgtattttgtgcactgttctgtgtaggctacaaaggaaaaggcctagcacctgcccttggggagctcacccacccaggatggacagaggtgtgcagacagagctgcagggtgggcacaaagggtccatctgctgaagtcctgcagatgcagccccgagcttgtccctcacgtcagcagcctggctcctggtctcagagagaactgtgtggttcccaagcattcactttaggaagaatcacttgcccctccctggctctctgcttcaaggaactgtgacaaccttgggatttgcaaactctctctttaatccttaagaggaaaatgttttggtaaaaagtcaagattagcagatacactcgggtgaaattctttccctggaaataaagaatagagccattaatatccacagtagagtgactttaaatgcccccggggggtcagcaggaaccagggccctgaggaaaggatcagcgtggggaagaggctcccacttccctgtgaggagctgcacatgcagtctcactggagctccctgctgcaatgctgttgcctgtggtggttggtgtggatgctgcctgccaagagccctgattccccaggaagagagaaaaaggcttctctcaggacggccctggtcgcatctgcctgtacaattcctggagcctttggggagctgaagtcaggggctcaagtgcccctgggtttcctggaggaggcaggtgtggtgagacagctgacagacaggagaagggatgctctgaggaagtgactgtccagccatgggaaccagatggcccctggctgtagtcctgatgctgccacttgctagctctgtgaccttgagcaggttacttcacctctctgagacagactcactgtctggacaatgagtaaaaccctacctttcctgtctcagagatttggcaatgggacccaatgacatcaattggaaaggatgctgtgggtgaaaggtaacctttcaggacagcgacaagcctgtctgggcaggatgaatgggctgtggagccctgtatatcctagctcactctttgaacctcagtttccacttcttccctttttatttattgccggggtcttaaatgagtgttgggggtatctgattctccctctgcctgtacttttggggccaagcactgagctgaaaagacaattcctcctagttctccaagcctacaacctgccccctaaccagctgtgagctgtaatacattctccagtgtcactgtgaggtttgtgccttcacccccattttatagatcaggaaacagaggctcctccaagtaaaggagcttgcctcagatttcacagccaatgagtggaaaagcctctgggattcaaatgtcagagcccatatttttcctacttctcgcacctgttatcatatgctgcctcttcctttaacctgcagttccctcccttcacctccaccgtctcaatccttcccactctttaaggttcagttcagctatgacttcttctatgaggctctactcattttctcagatttcttcctcctccaaatttcttgtaaaaattatgttttttctctgattctaaaagaatgcacattacattagaaaagatacacaagcatacagaagataaaaaccacctaatatcccatcacccagaagcttccagtttttctttatgcatttgcatatgcatttgtgtttacttttccccaaaagttctccgatactttgtcctacttttcttttgacccttataacttcctgacttcggtacctttctgatttgccctaccagagtgtgagcccctggaaggcagcctctgcaccctgattcaggttgccacacatatgccagctcctagtgggctggagggaaggacatgcggttggggaactggaagactcatgctttcagctgtgtgcttcctccctagagtgcaggcagaggaggaatcgaatcccctcagcactcttgtaaagaccacagcaatgagtgagagatggtgcctgccagacataccattctttacttttcagcttaaaacagatacaaagtttggggaggctcactggaggaggcttggggctacactggaaagagaagaacttggattcacaccccagcttcccctcttcccagctctgtcacatttgcaaactctgagtctcagtatcctcatgtgtaaaatggggatagggtttatagggttgtaaggatgagatgatgagttgtttgcaaacaacttctcacagtgcacagtgaaggtcagcaatgagagccagccccgccctttcttctttccaaatgattaatatatctgttaccagcctccattcattatatagctctgtcatgtgctaagcaccatgggggctgaaaaagatgttcttcctgccttaaaattccactggggatgaacaaattacacgggagctgatcagagaggaaggcagtccattatgagggctaattgagcagtgcagaccatgttgcaaactgagttagggcctggagagcttactgtgtgctggggtcctcaggaatgccacagatgcatcaataaccacctctgctactctggaagtagtcacatcaggaagactccagagataagcttatctgggctgtggccacagagctggaatttgtaagctttaggtttctatgtctcatgttaccagcttgtctataaattgtaaattacagccatctgatggttagggaatatgaagtttggttaagagaatgaaatgagaccacgaagattagagaacaggaaaagaggggactggggactacatacccatcagaatcttcattcagtcctgaccctcagcaggagggggatttcatcaggctcatttccatccttgatttcgtccatcctggttctcctgacaaggggcatttatcagagttatggcatgggaaatcacaggggagtaatgtaccatggcatttaagagtatgaacgttggagtcggagctattttctccgctacttactagctgtgtgactttgggcaagttacttagcctttctctgagcctcactttctttatctgtaaagtgagggcgatcagaataaacctccttcatatggttattttgagctttataaagagacaatactggctgagcacggtggctcactgccagtaatcccagcactttaggaggccaaagctggaggatcgcttgagcccaggagttggagaccagcctgggcaacatagggaatgagactcctgtctctacaaaaaatatacaaaaattagtcaggcatggtggtacgtgcctgtaatcccatctactcaggaggctaaggcaggaggatcgcttgagcccaggaggtggaggttgcagtgagccaagatcacgccattgtactccagcctgggcaacaggagtgaaaccctgtctgagagagagagagagagagaaaatactactatggtgcttataaaagttcaataaattttagctgttgttagtattattaaagtaagatctgtatgaaaataaagcagattttttcccccaaatgttcatgtcagaagtatatatttcattggcaaggggctgcttctggaaggttgagaggtatcctgggggaggggatagagcactggcaaaattggcatcacaattcaagtcacctcactcagtgttttttaagttatcaaaatccacagtatgaaaagcatttgacattacagtccactatatttatgcatttataaacaagagaaaaaatcacgaaaaatacagtaccacgtgcagtacacactgattccatctattctttttttttctttttcctcaaatgcacttgccgcctacttattccagacccaatgattgggtccctatccacagtttggaaaacactataagaaatgattgtgtcctctcactttccctctctgggatttagttttccaactataaaatgctcctgatgcccagccagcctcaccgctgctccgagtcaatgccaggaacgctgatttagcacatgctatttggagggtacccatccaggtgctgtgggagggacagagattgagaagagtgctttctgaccccacagaggccatttggaaaccctgggaatgggtgggagggttggaggtggggattgcttctcccctaagactcagcgtgatggaaaggcaatggggtgggaactaactggtgttggtctgtcccatttgtgtcccagcagccttcctgacagcgagataggagaggaccccaggtacagccttgggactgggtcagaagtgggtctcaacaaagggaaggggtagggtgggggtggaggacttgtgggtgggtaatgctgagtatggattcagggatgtgcagcctacatattttcagagacatggggctaaggcctgcattctcaatgagggcaaaatttggttcttggggacagaaaacacttagacattgcaatgctttgtggctgtccaaagtaccaaacagatgccagtatatctgtggtgctgaaatttcatggtgaatggagtcagaaaatagactagcgattgccagggtctggtgggagagagagggaagggactgccaatgtgtatgggatttgttttggggaagataaaaatgttttggaattagatagtggagatagttgcacaacctggtgaacgtacttttagtttcagaggttttctaaacctctgatttttttttaagtgacaggaaagacagaaaaaagtatatctaaaaaggctctaggggtgatcatggaaaagaaagttaagaaatatgactgtaaggaaaggagatgggtgtccctcaggccaggcagaaaattcagtcttgttgctttatgttcatgtgcaaatctaaaaaatccaagtgatatagattaatgaggctctgagtccctcaaaaccttccctccccttacctctccaaaaaacacttgagataccctagaggtggtatgaagtcaggatgggaaggttggctcagctttgcaaataagtttaagcctctggcctttgctctccaacaccaaagaggcttcactttggtatattttctctgccctttctccctccttgtccccaactgtcagtatgtgatgacaggctcagcctctgtaatggtagtgatcatatttcttgagccaaaaatcagacctcatggcatgtgacaagtttgcatatgtggatgagaacagagtggcagaatatttgacacgggagcagcttgggcagtccagggcacatggcactgcacctgacatccctggcagatcccccacattccgtggttgtcttctgatggggccatatggggctgcagatcatgcctggagccctcgcagctccagggctgcgggttcccagccccagagtgcaggtgctggtgtcagcctgcctggcctggcctggctctgtccagagcactccttgccccagctgtttgtgcagctgtatcagcctcagacctcagcctattcattccaacctgaatgcagaggctgggtctggaggagccacattgcgggcttcatactcctgatctgacaagttttccccccagagcctgcaccaatggcacctctccccattctccctcttaactgggtcctccagggccctcctcacacacccacgtggtcaggcagcagaggcttccccaagatgggcacaccccactctccacacctctctatgcagcatttgtggctacagactgggtccaggggattgtaaaggcatgctcatgttgggttggagggagctcaggatcttcctggaggatatggttcactcccatgagagctcagtatgcctttcctcccctgctgcagcccagagcgggagacagcgaccgacttggatatcaggtactgcgtcctgggaacattgccccccagggtcaactccctccagggtgctctcaggcccaagggagccacatcaccctgctgggcagcccccagaccccagccccagtgttgggggaggccagggagggcccctgtgctccaccaggtggctcgggagctgctgctgtttctgtgcatccatttactcccttcacataagatcatttttatctgggatctctttttcttttttcttcaaaaaccacatcactcaaaatgtggcttccttggctctgcttttaaaaaaaaaaaaaaaagttcttccatttggagaattacctgctgacttcaaagtccagtggcttgagggctacccaaagagggaggaagccagaagttgagtgttcccttggtttggtcacacttttgggctcctccctgactaaggaacaacagactgcagggctggggcaggctgggtgtagggcagggaggggatgaggtcctgctgccccagtcagttgagacccagacctctcaaacctgcctgggggaaggcaaggccaccagaggccacactaagcagatttctaccaactgcacctccccatccccttgcctccatctgagccatcagcttgacaactgcctctgagaacaagcccctgagaatgccttccgcaccccctactcccgccctgctttttccaggaagagaggccccgtggcctatgcttcgcagaaaccatggctgctaaatgccactgtggaggagaacatcatctttgagagtcccttcaacaaacaacggtaaaagcctgtcggagggaggcaggatgtggaggggaggaactgtctctggccagcctgccccagttccgggcccctccatcgatcacccacacccagccatctcactccccaggtgcttacctgcactccagcctctccatatggtgcacctggagaggggccaggtgtgcctgagcattggggcaatccagctcccataggggagagggcaggaatggagggaagggagagagccccgctgccttttctctagctggtgggagggctagctagctctctctgtgagtctccattcgcctggctcctgcactattttccctccaatgataatagttagggctagcatcgactgcgctcttactacataccaggcacagtgccgagctctttgtacacggaatttcctctcatgcttacaacaacctcagtaggtagatattattgttattcccactctacagatgaagaaccaagtttcagaaaggtcccaaggccacccagccagtaagtgaccaagatgggtctcaaatccaaagctgcctaacacctaagtacatgtttgtcaccaacatactctgatgcctccatgaactctggctggcacctgcccaggctaagggctggctggggaagtatgagaggaacaggctgggcaaatatttgaccagccatcatcattactgcctaaaccaaccagcagtggttttccctgcagtgccccaagcacgggttccggctgcagcttttcccactgcacagagatcatgagcgccctttcatcacttactctgcatatttgttcccaaccaattccatccttctagtatttaacctgcccaaacgctgtgtgaagtgctgacctcagctcttttcaagctcacacggtgtttgcttgcacccaagcgggaggcctattaaagccattgctcaccctgggcatagctacccagagactaatgaccctctgcaagtgctcgggccaactctgaccaggctgaccagctgcatcccctgcctctacccacgccaggtacaagatggtcattgaagcctgctctctgcagccagacatcgacatcctgccccatggagaccagacccagattggggaacgggttagtagcagcctctgaggggttttttcaaagccaggacccccaacctaccatgccctgagacactactcaggacaatgggtaactaggaaataggagacattgaaggctgaagagttgcctgcagtaaggtcaaacatgttgttcttgatgatgtcctttgacaggttttcagtcctgcttggagggcaaggtcagcttagtgccctcccaggctggggatcttcttcatttgcaccccaggtatacactgagagcccacacagcactgtgctcagcctggggttgtattgttcctgttcatcctccagatggggtcccctccacaagcttagacgaacaggattctcctgtgactgtcctccttttgtgtgattttaatccctgctgcctctgtctttgtttgtactggtcagatggtccctagcgcctacacaatgaatctttaaagacttggggctcatgctgccctcttctgaatgaattcagtaaacacgtgcaagttccttctctatgcaaggtgagaagcaggcaaagaagtggatagagccaggcctccatcccaaagagctcatagtccagtagggtacaggacagtgtctcctgaatggctgagggcatgatgtgttcctcctctttggtgacagggcatcaacctgtctggtggtcaacgccagcgaatcagtgtggcccgagccctctaccagcacgccaacgttgtcttcttggtgagtgcaagttcccttggggtcctggtctctggctgcctcccaggcctaactgcccacctccacctccccgcaaccccaccatcatccaacaatctccctctccaggagtaaatccctcctgccagagatattgccttatcatcctagtgatagggaaactgaggcaggcaaggatagcacaaatgacccattgcagacttcagatggagctctgcagtagccaatgaggagaggcaagctgtagttataggctgcctgtctgtgggacagcccaacccctcaacacttatgcagcccgactataagaatggctgataacagaatgtgtgctgccacttcccatcttatgcccagtgcagacattgctaattgttcacagcattatttcccatggaacttaactcatcctcagaatccttctcaacacagcactccaggtaaccactagccatcaaacatgagataaaactaggccaggcgcggtggctcacgcctgttattccagcactttgggaggccgaggcaggcggatcacgaggtcgggagatcgagaccatcctggccaacacggtgaaaccccgtctctactaaaaatacaaaaaattagctgggtgcggtggcgggcgcctgtagtcccagctactccggaggctgaggcaggagaatggcgtgaacccgggaggcggagcttgcagcgagccgagatcgcaccactgcactccagcctggggacaaaccgagactttgtctcaaaaaaaaaaaaaaaaaaaagaacgtattcgcaatccttacactacttcatgtcaagttctgttgtgtcaggtgccttgactgacactgaagaattctaagaaccagtccttggcctcaaagatttagaatctgattagggagacagagctcacccagttcaagaggcccagcccggttcaaatccaaactgtgcggcataaactatgagggggccttgtccagggagacaactgtgagggctggagtaatcagggagggcttcctggaggagagcctcaaagggagagtcaattaaacagaaggaaagagggaggccatttgcacagtgagttggaagaaggaagctcaagtctctgattccagctttattccctcccctctccctacaccacacgcacaagcactcctttactaaagacacttcacagtgggaagattcagtctccgttaccgtctgacacacacacagcgttttacaaagcatgggtgcattcgcgatctctcatgagatttaaacaaccctgctagagaaaagtgaagtggacattttatttcagtaaacgtttatgaagcgtctactctgtgccaggcactaaacgtttatgaagcgtctactctgtgccaggcacaggcacaagaagtctcagttcttgggagtgccataatcaggaatggacaaacaatgatcagatctggctttgcgccagtgtcacgggaatagggaggaaggaagggtaggcgtgggggtcaggacaggatgcaggaggaactggtgcttaggtgagcgaaggatgggtgggagttcacaaggcagacaaaaggcagagcagcactccaggcagaggaacagctcaggagaaggcccagacggcaggcttcctgggaacctggaatgcagagtgctgggaaagcacagatgaagcatgagtctagaagggaaagcgagaggttataaagcacctggaacaccagcccacagggtttgactttagagatgatggggagccgttgaaggtccaggagtcaggcagtgaagtgattagatctgtttgagagtgatatctgacaactgccccattttaaatgaggtaaccaaggcccagagaggttgggtgagttgtccaaagccacacagctaactagcttcagtccctagagcagagttgatagaactctaatgggttttatactcattgtcacccctccccaccatgcctttccctaccctctactctcttcctctcccttctgcccaggatgaccccttctcagctctggatatccatctgagtgaccacttaatgcaggccggcatccttgagctgctccgggacgacaagaggacagtggtcttagtgacccacaagctacagtacctgccccatgcagactgggtgagggggaacaagggggtcaggctatagggggcagggctggggaggctgtcaggcatcttggcaggaaccaatccgttgtcttggtagcaactgctgagggccacaaagcataagagaccagcactggatggctttatgcatgctgggcatttcagggagaccctgtacaggccaggggtttggtatcacctagacccacagacactccccatcctggcccgggccccccatggtacactcaaggctggcaccaagaagtctcaggaataatcaagtgctcacttctcaccttctgattcctgcccttttgatgacccatccccgcagtcatggggagtgcccatttggatggaaaagccctcttcccaccctatgaccttcccggggtggatggatgcaccaccccgggaatcatatgggaaatatggaaccaaacaatagcagtagtaatagaaacttcaggctgggcgcaggggctcacacctgtaatcccagcactttgggaggccaggacaagaggatcacttgagcccagaagtttaaggctgctgtgaaccatgatcatgccactgcactccactacagcctgggcgacagagccttgtctctgaaaatttgaaaaaggaaagaaagaaagaaagaaacttcaatattatcagtagagtccaatgttgtgaaacccctcattaactaaatttccatactcttcagtaggtagaaaataattactttttgattcattagaaagcacttaatttttaagatggagatcatgtaattttgaactctaggtcttgcctactcctatataaattctcctctaaacaacagccaaaattgaggccctctttgagcttcaggctggtgccaaatggctctgcttattttccccaaaataaatcttccttccatgtatgatgagaccccctccagtataaagaagacccaaagaaaatcacccaaagaaaaaaggcccaaagataagacccaaagacctaaagatttaaatatatatacagatacagaaggtttgtttctgagtttctgtagtgaccttggcaataccttgtagttcaggacaatcctgaggaacacagaagtgctggcttccttgaggaatcagtgatcaggactctcgagccccttgaaccccagcatagggcgggagggggtgagggcagcaggggtgggtgtctgaattaatgtcaggtctacgtgatggtgtcatcaagtgttccagataaaaagttttattgagccgggcgcggtggctaatgcctgtaatcccagcaccttgggaggccaaggcgggtggattgcttgagcccaggagttcgagaccagcttggggcaacatggtgaaaccctatctctataaaaaaaaaaaaaaaaattagccaggtatggtggcgtgcacctgtggtcccagctactcaggaggctgaggcaggaggatggcttgagccaggaagcagagattgcagtgagctgagatggtgccattgcaccccagcctaggcaacagagtgagaccctgtctcaaaaaaaaaaaaaaaaaaagatttattgattccaaagaggcatggccacacacacttagaccagcaggtgctttgctaagccctgatggaggctgccagacccgccgtcaagaggagctaagggtagtgtacaatgagcccacttagtgtatgacggccgctgccgtgggtggagtccttgtgagtaaccagccagcttgagcaggatgcactaatttgctctgcaaacccagccattgagaaatacgcctcagatgtaccgaactctaggtcctaggagtatgttggttggggtaggttatcaataccagcccacttgcagtggatgagctggtggccatttgtagtgaggaaagggatgtgtcaacctccatcttagactccacaattgagggatgtgaccaccattcctccccagccagcccccaaaccacgtttgttgctgcctttccagatcattgccatgaaggatggcaccatccagagggagggtaccctcaaggacttccagaggtctgaatgccagctctttgagcactggaagaccctcatgaaccgacaggaccaagagctggagaaggtgggtatatccagggatggccaagcagccacccctggatgcaaaggttctgctagaacctgaactcataaaggtcttcctgtccttagtgccccaggaagccccctaaagggcagatgtgggagctgggcatgaactggctcctaccagaggagagacagtacctgtgccaggtgcccagggcagaatcaggtgggcaccttcgccttatcctgaggtagtcagatactatttagttgcaaagtttcagaaaatcaactcaaactggcaaagaaaactaagcaaagaaaacaagagggaattaaggatttattgacccatgaaaccaaaaagtccaggtgtgtcatagctttaagtgtgctggatccaggtagtcagtgtaatcagaaatctgtttctcccatctcttgactctgctcccctcaaattggctcagctcccctcaaattggctccattctcatggtatcagtgagggccaccagcagtcttaggtttacattctcccagctcaacaactctgccagaaaaaaagtgcctctttccccatagttcagcaaaagtcccagggctgagtctcactggtccagtttggtcatgtgcccacccctgaacaaatcactgtggccagcggtgtggaatgtgaggattggcctgtcctgggtcacgtgccactttgggagccagatccacctgaatcacagagactaaaaacaggggaagagtggttccccacagggatatgggggtgctattatctgatgaaggggaaggactaaatcctggcaagatgaatgtgtgtctgtctgcccctccctcaggcagggacaaagtagaaatctgacattggtcatcaccagagtagttaccccttaacttccccttcccccaccaaccatatatcctgaagacattgcccaggccacatctgtcttttaggagactgtcacagagagaaaagccacagagccaccccagggcctatctcgtgccatgtcctcgagggatggccttctgcaggatgaggaagaggaggaaggtacaggcaatgggactgggagtgaaattatggcctgaggtctgatcagccacagagaggctaaggtttggggttctgggtgtggtgcagtagtgtgcctttgattaaatggcttccctctgtgtgcccccgttgtcccctcagtaagtggggataaaatgccctgattcaccctcagagggatggaaatgtgtagccacagagtgggttcttgcggcctgcagaggaggcagctgagagcgaggaggatgacaacctgtcgtccatgctgcaccagcgtgctgagatcccatggcgagcctgcgccaagtacctgtcctccgccggcatcctgctcctgtcgttgctggtcttctcacagctgctcaagcacatggtcctggtggccatcgactactggctggccaagtggaccgacagcgccctgaccctgacccctgcagccaggaactgctccctcagccaggtgtgactggcggcccatggcagaggttgggagtggggatgggggaagggctgagcccatgggcaccctggaactccaaatcactctctgcctgtgaaggagtgcaccctcgaccagactgtctatgccatggtgttcacggtgctctgcagcctgggcattgtgctgtgcctcgtcacgtctgtcactgtggagtggacagggctgaaggtggccaagagactgcaccgcagcctgctaaaccggatcatcctagcccccatgaggtacccgtctcccctggccaggctgggactgtgagcaagtcactgttctctgagccttagtcttcccatctataaaatggggatatacaacctgtcacaagcttgtgggggtgactcaaggagacagtgtgtgtaaaagtgccctccttgtgcaagaagcagggagaaactggcatttactcagccagatactgtgataggcattgtgtgtggttagctcatttaattgttaccatggccctttaaagtgagcgtctgcacatccaagtaaagattgttttctcctccctaagtgggtgtaatttgcccatccccacccatgagttcagctccctgccctcccctcactctctctccctcagccagcctcaggttttgacactgggggaacaggtagctgttctattaataatttcctgtaatgggatggataaaaatctcaaaggccacttgatgtcaaagaggtttaaagttgtccctgcccaattggttggccaacttggcttaaaaacacaacaggcaaacagattttctggccccttgtcgaggctagacctcacaatctaactgcactttttactttccagcctcatgagttttctgtggcccacagatatggcctccaagtttatttacttttactctctatttgccccagctctgtagttctgaaactccctggttggggttgggctgactctgggtcagccagccggcaggctgtccccagggccctgttcctcttggcaggttgtccctctggagaggactctgtgtcccaggaggacagctgctgagtcaggccgagccggcagctgagaaaggcggcagtcgtcagatgggcttgagaaactgaaaggctaacgaaaggccagcgcccctttgggcagctgcaggaattcacggggatacaggccagatgtctacaaattggcagaggatgccagacccatgaatgactccagagacacttacatgaaataattaactatctcattcagtaaacaggaagtaaatcaatggacaaatgagtaactcttcctctggctgcctcttaggttttttgagaccacgccccttgggagcatcctgaacagattttcatctgactgtaacaccatcgaccaggtacagaggaccgtgccacactatccccccttccagagacacctcggacccctgggggcttctcctgtctgaggctgggttccccagatcaggtgatcacagccctctgggaagaagccagtgtccccgatccgattataatgctgcttcagggctggggcctccctcgtgggagcctcacagtaaggctgagggaaaccagatccctttagcttccacctgagatcccactggctttctctagtaaagttccagcatattctgaaccaaggtggctgattgtatggagaatattcattttgattcagcctgtgttctttatttaccattgtaccagatggtgtgaaaacaaaatcttgattcctacctcagggagtttaccttgtagctggagagatgagatacgtgcctataataaagggagagcaaggccgggctcagtggctcactcctgtaaccccagcactttgggaggcggaggcaggcggatcacttgaggccaggtgttcaagaccagcctgatggccaacatgatgaaaccccttctctattaaaaatacaaaaattagccaggtgtggtggcaggtgcctgtaatcccaactacttgggaagctgaggcaggagaatcatttgaacccaaggggcagaggctgccgtgaaccgagattacgctgctgcactcaagtctgggcaacagtgagactcagtctcaaaaaaataaaggatcaaaaaataaagtgagagcaaaacatggcggccagtagcactctaaacacagtcaataccaaaattcacctcactctctccccctcgtctccctcagcacatcccatccacgctggagtgcctgagccgctccaccctgctctgtgtctcagccctggccgtcatctcctatgtcacacctgtgttcctcgtggccctcttgcccctggccatcgtgtgctacttcatccagaagtacttccgggtggcgtccaggtgatggcctcaggggtgaggggtgggaggtgctttgcaatgtgcagtttggtgtacttgctagactcatcgttatgagagtaatagggtcgtgttccctccaaaaaataaaaacaaaaaacagaaatgaaggaaatagaaatatccacatcttattccaccgccctaatataatagtctgccaacacacgcacacactgaggttgacatctgaattatttccttgggcgatatggtcaggactggaattgctaggtcatgataaatgcacattttatgcccttcattcattttgccaacatgcttcccaggagggttgcatcattctagtggtcaggctgattgctgatgcatgaaatcggcgggcacctgattcaagcagtgttatgataacacctcccagcccacgtgagtccagagtgtagctgtaagccttgacttgagggagcctctcacagccattctcatggatcacatttgccctcatgagctttggatccatgcacgcctctttcctcctcaaaattttctaagaatgttctctagggagttctttctgggagtgattctcccagattcatagaaactcatagattcaaaaaattgtaggaaaaaatttaaagaacgtctaggccagtgtttctcaaactgccaattacagcccatcagtgggtcatgaaatcaatatcatggatcacaaccagcatttttttaaaaatgaaaaaaacatcagactgtattcatagagtaaagcaagctttgcttcatgaaacctttgtgttggtcatggaggtgtgtgagtactgatttgtgagataaaatatatttctgactgcaggttgtggtcagaaaggttaagtacctttcccaagtgcacatagttggctagaaactagagttgagatacttattagcaataataaaatttagatgcattttggacacaattacctgccccaaaggatcaacatttgtataaatggctttttgcttggatgatccagaatggcccgacacccacacgaacaacatagctttttgacactcaaaaaattcaaagtgctgcacaagctgttctacaaagttcatttcttctgccagagaaacagcccagtctctgtggcacccagtctgaccctggagatggtttatcagggaaatcaacttcctgcatcccaaactggcctccctggcactgatgtgcttgtcgaggtgcagctttggggagcaggaggcaattctgttgccatggaaacctctggccttaccccgagacgaaacctatcatttcagcacatcactggccagggtctaaagagctccttgatggggtaagcggaagacggggttgaacgctttgagtttggtcttctgttcctttggccagctgtctcaaggttcagattgttcacctgtaaaatggaactagcactgcctgcccagccttagctcagctccaggctgtgcagcagaagtacagggacagatggcgacctggggttgacaatgcccaggacagcagtaattgtgccccacatcaggctgtgtctaagcattgtacataaacgatctcattcagtgctcacaaaagctcaatgggctggtggcattgtcttcccccttcacggggtaagaagctgaggcctagagaggtaaggccattcacccacacagcggtagcaggtggagctaggcttcaggcccaggccgagccctgagcctgccctcttaactgttccactctgttccccgccacagggacctgcagcagctggatgacaccacccagcttccacttctctcacactttgccgaaaccgtagaaggactcaccaccatccgggccttcaggtacgagtccacattcccccaaggtaggagtggaacaggggtggggccagggggcacaggccatgagatttgattctcaggactccacttgggaaggccaaggacacgttctctctcaagctgcctcaggtcccaaggcccaagggatatccaccagcagggacaggccaggtgggctcccactgaatgttctagagaggaaaattccagctctgtagacaagcccaggacctctgtgaggcagagcatgaaaagagacaaagctgggacaagtcttcatgtatcaacgctagaaagggccttaggtgcgggccaccctaagcccttcttttattaaggagcccctgtgtgccaaacactatgctgagtactgtacaggccaatcccactcattctgcactgcaaccctcggtgctgagaatggtcatttccattgcacagacaaggaaactgaggcacagagacgttctataacctctctgtgtaaggtgccacaaagcccagacttgaacctatttgttcatgcaacaaacatttactaagccccgactatgtgctaagccccatgccaggcactaaaaagatgagtcaaataagccgctgccctgcaggcgtttacagcccagactttgagcaggccaggataaatccacgtgacaagtattctgaaaaaagcggattcaagggctgtgggagcatagaagagagacagtccgggaaggtttttgtaccagaggtgtcatcagaactaggactcaaaggaggggcaggagttcaccaggctgaggaattcctgaaaacttcagtgcccctgccatcgtctcactaccctgagtggtgatgttggggtggacaggagcatctgaggttgcctggggaatgagggaagctgttgtttcccactccccaagagtctgtctgatctccagaggcatctctcttccagtcaggcaggccagagacccctgacacacaaagttgggctcttttctcatcttcatccagagagtgataataggttatttttagggtggcacagctgcacgaagtatgacagtaaccatgagacaccaagcactgtgtccaggagtaaccatagggcacaaggaccagccaagggccagagaggcttacatctcctccccccaacccctgaagtccagcttcagccctggagaggtatccaggcccctctgcccaccctggagcacctagggccagtggaaatccacctcttagggatcttgtctaagtaaagaagagcagagcaaagctctgccctggccttggcgctgctccctggacatcccttgcccctggacaagcctatgctgtgtcttccacaaagaagcttgctggggactggattatgactctagagtctcctcccagcctcctcttctcaagcctgaacttctcccgttccttcaacttccaggtccctcgacattactgagcctagcctttgctctaagttttggtgatttccctctctcaattggtgtctcagagggccctggggtagagagatggtgactcttctagagtgggccacagccccttgtgtgcagatcccagcttcctgtaaacagcctcagatcaggccaaacctgtggtcagccagagccactgctacccagtgaggtcttccacaccctactgacacggtgaatgatttttaaatttgaatgaaaggctttttaatcaaccccatacacatttaatgcattggctttaatccagcagcctgttgagagctattagcacttattgattgcccacttactgtatgccaggcaccgtgctaagtgttgtatgtgcattattacatttaatcctcacaaggaccacataacataggtacgaatcgccacattctccagatgcagaagcgagacccagagaggctgggtaatcaatccaaggtcacacagactgcgggggctggcgctgagcttggaacccaggtttgcctgaccttctgggctttcctaagagatcttattttttcccaaaagagtttcaagagtgcccagcactgggctcagtggcgggctcggaggttgttttcgttcatgtaggaactatcacttccccatttttttcataagaaaactgagtctcagtcctgatacacagccaggaagttgtgatgttcaggctccaacctgggtttacatggctccgaggctggggctcttttctagtcctcagacacactgtcgcacgcctgtggcagaagctcccatctcacacttgccgaccctcaactcacacagtcctgagacccacatacgctgagcgcctcacactcctataacacgcacatgccctgatgcacacacattttcaacacgcacttactctacccttcaggcatggtttcacactcactgcagacacgtcaccctcccacacgtctccaccctgggggtgtgcagtagcatgctctctcccacctcagaacctcccttcagtcccctcagacacatgccctctctccacgcagagacaatcaaagctgaactaacaccttccagggtgaaaagcaaatgcccagtaaggtacgtcttgggtgcctccgtgtcccctgagtttggtcctatcaaaccagcgatgatgaggcagcttttctttcgttccttcctccatcatcaaacaagtgctcctgcatctcctctgggccgggcctacgtcagcaaggtctgagggaagcggccaaggagagtgatgacggcagcccaggttgatcagagaaaggaggcaggtccatgcgcagtaactcagggaaaacatgatgaggacctaaggatgagaaagaagcctccagagttccctgtgcagagagattccatcaatttcagagggtcaggggagtgccatgcattcatccaacaaatatttattgatagtgccaggtgctggggtatattggtgaataaaacatcttcatggaatttgcagtctattgagggagatgattataaatagctagagaaatgcatgtacagcagatactgtggagcaaacaggttgcagacaataataggggaaacctactttatagtaaggtagtagccaggaagagcctctctgaggaggcagcatttaaggcaagccctgaaggttgagttgagccagccttatgaagagcaagggcaaaagccttccaggaaaagggaatagtgtgtgcaaaggccctggggtagggaagactttagtattgtcacagagcttttaaaaagctgagtggctgcagcatagtgtgtggggtgtttgtggcaggaattaggttggcaggagggggttcttcatcctataagcagtggaaggtcattaatattcttttttatttgtttttttttttttttttttttttttttttgaggcagagtctcactttgtcacccaggctggagtgcagtgaggtgatcttggctcactgcaacctccacctcccgggttcaagcaattatcctggcttcctcagcctcccaagtagctgggattacaggtgtgcaccaccatgcccagctactaatttttgtattattagtagagacagaattccaccatgttggccaggctggtcttgaactcttgacctcaggtgatccgcccgcctcagcctcccaaagtgctgggattacaggggtgagtcaccgcatccggccggagatcattaatattctaaacagtgggggagaggacacagtttgcgatttagatagattaagccagccactgtgtggagcatggactgtagggagacagcaggtagacgtattcaggaagctgatgcagtagtccaggtgagagtttgtggtgggcaggaagcaggatagagggggagggaggcaaggactcttttagagagagacataagaggacttgccaaggggctgaatgtgaatccaggtgattcctgggtgagaaactgggtaaagggaggtgccccttattataatgggaaagacctagagaaaatggatcttggggtgaaaacaagagtttggaggaggtggggattctggacaggtttgaataagcagaaaggagtggggtggacattccagagagggatagcttacatgaagtggccacggtggcatgtctggggactggaggggccctggagcctccctctgcaggtagggagactcctaggagctatgtggaccaacactgttcccttaggagcttctcatcctccctccaggtatgaggcccggttccagcagaagcttctcgaatacacagactccaacaacattgcttccctcttcctcacagctgccaacagatggctggaagtccgaatggcaagtgctattcccctctaccctggcctctgataggagggtggggccagagcaagagcacacaggtacctggggatgaaagagaggataggataccagatcgtgtggacaccaagccttcctgcttcccccagccctggtggtcctcctagtgtctagcctgtgctccttttccccatatcactgcctggaggcttgtgtatctgaggtgtgtgccagtggcaagaacagttgtggtgaatgtgtatctgcagtgggtcatatgacacccacattgtgtgtgtttgtgggccagctgaggcgtgcatgttaaagggtgtgcaggggctagggggtaggggagcatgagcttgtgggacatgttggctcctggggctccagccttcgcagcccttgtgtgtgtctggtgacgtgtgcatgagttgcagggctggagtggaggcctggctgagctgctctctgccccgaaaaggagtgaggtagaacaggggcctgtggctctaacccctgagcgcccaggtcagctcctctccctccccaggagtacatcggtgcatgtgtggtgctcatcgcagcggtgacctccatctccaactccctgcacagggagctctctgctggcctggtgggcctgggccttacctacgccctaatggtgagcggcagtgggctagggcagaggaggggtcagacaccagcactcccggagcaccttcgtcactggagacatgagacactcccaggccttaccccaatttcatttgcatctgatgccagagggacagtgcgggcaggaaggctgaccagcaggccccagggcccaggccccagacaggtggaggttggggagccacatgactgaccctccctgtgcctccagggagggctgctctgagcaggcagtggatggcagcaaaaggaatctggggccctggcccctctccagccttaagaagagccattctggtggctgaggacagaactaagcgaccatggagtgtgcgccactggcttgctccccacaggtctccaactacctcaactggatggtgaggaacctggcagacatggagctccagctgggggctgtgaagcgcatccatgggctcctgaaaaccgaggcagagagctacgaggggctcctgggtgagaggctcagggagaggggtggggaagagtccaaggaggagtgtgtctgggttgggggccacaagggagcctggggatggggtggcactttcggatactagctgtggcccatgcctggtggctgagcccagcccggcccccagcaccatcgctgatcccaaagaactggccagaccaagggaagatccagatccagaacctgagcgtgcgctacgacagctccctgaagccggtgctgaagcacgtcaatgccctcatcgcccctggacagaaggtcagagcacgggcccaacccaatgctgcaggacaggcgtgagcaggggatggggcatgcacggagctggatggcttcgcagtcacctcgtggccctccagggccgaggcctctcactattcagacatcgcagtctcctgccctgggcctgtgggggcccatctttcctctccttctattgccttcccccagtgctgccctcaggccttgtcttctcactcatccaccaaggagaccgacactctggactcccccagctcacacgggctttgtcagggcctccctctctgcgaatggtcaggggctttccctagggcactgccccgagcttcagggcagggacctgggggcagacagcgaggccacccttgtattgagggtgagcccctgcctatggccctggcccagctctcctctcgtttcccactctgtctctttgtctctgtctcactttgctgtggctgtccatgtcattctctgaccttgggatgtacctctgtccctgcctctctcatccttctatgtcactatctgtctccgtattgtaatttctgttggtacccaagtgccaggaagcaacgggatcagaggtggctccattgtagggcggggcacacagacacatccatgcataccactctcagctgcccctgtgtcctcctgccacacccatgcccatagagacacaccactgccccccagctctccttcagccaagtacccggcacacccagacccacaccaaggcccaggcaaatggacatccatgcctgcacttgcgtgccggtccctgtgtaagccctctctggacccactgcaggaaacaagcccaaacctgtggtgtccaaagagaaactagtcagaaaaccaggccaaaaagataccctgtgacctcccacacctgcacacacacccagagctagcatagaggctattcccagcagccccagagtcccagtggcggtgcctgcttctctctttccagatcgggatctgcggccgcaccggcagtgggaagtcctccttctctcttgccttcttccgcatggtggacacgttcgaaggtgagttgtaaggcgggcaccccacgtgtacccacagccaccagatgaggcctcagccctggcacgtggtcagacatgacaggaggcccagcagtcaccgccttcccctgcaccctcactgggacccatgcagggcacatcatcattgatggcattgacatcgccaaactgccgctgcacaccctgcgctcacgcctctccatcatcctgcaggaccccgtcctcttcagcggcaccatccggtgagccccaccacccctcaggcccacccagccccaggccggctcagttccatcagatctggagcacaaagaggagggggttgggggagaccaggatcccagaggtgtttcctgctcatgcccttctccatcccatcaggcccaggcagcctctggaaggggatcccccacccatgggtctaagatgctgtcccccacccactgccaccacctcggtgcttctcccagccagacctccaactcagtctgctctcgctcactgccctctttgccgcctggggatgcaggcaggaccctgctccctccctactggggctttctgtgccacttccagatttaacctggaccctgagaggaagtgctcagatagcacactgtgggaggccctggaaatcgcccagctgaagctggtggtgaaggcactgccaggaggcctcggtaactactcctggctatgcagctgggttggttgggcactcaaggaccctgtaaggatggcagacagaagcccgtgtctcaggtttgccccaagtttggagtctgaagcctggcaggaccatttagtcctacttctcactatacgggggcccagagaggtcaggtgtcttgccccaggtcacacaactggtcagttcagggtctggctcctcctgcagggtacagcgggtacagtcagggatccttgtgagacagagattgcgagtcccccatgccaagggggcatcttcagccctgccctgccccatccacctgcatgcccagttctgccttaggggaggagaagatggactgggcaatcatagacacgggtcactcatcaaggccaccggtgattggcaaagccttggtatatttgctgcagctcctggagcattgggggtggccaagccttggtttcaatgaatcaccctaccaaggccctacatacacactcagtgcacccctcagtgcacacgccccctcccagaactgcccagggccacagcagcacacacctccaggggtgcccttctcgttgcagtccttgcagacggcctccacattgttgtgtcaggtgcaccagccctgcacacgcctgtgctcttggacacacacccacctatttgcccccatgcacacattttccaacagccccccaagccatcccatctgctccactcacagcacaagattaactcagtcctacttcatctccccgggctgttttcagatgccatcatcacagaaggcggggagaatttcagccagggacagaggcagctgttctgcctggcccgggccttcgtgaggaagaccagcatcttcatcatggacgaggccacggcttccattgacatggccacggttggtcctgggcccctccatgggaccatggtcttggaaagggtttagtgggatgctagggagaaatttgcacgaagtagtcctgaggctcaagttgcctctaacatcaaatgctatgtgttgcagaaaatgaaaagagctggggggaccctgactctgtctagtcttagggaatgttacacacacacacgcacacacaaaaacactatgcaaacacacacataagctgcacacacagacccacacagacttcacactgtcacctatcacaacagcacacacacagccacaaccacaacctacatacacacacagagctgagctcccaacaggctgagtccagtccctgagtgccgggaacctgttcagtcctgtggggtgggggtgggactaggatcggggtcagatgggagctgagccacagacctgggctccacatcccccaagccaggccagaccccatccactgggcaggtgagccaacagctgttgcccccacttggcaggaaaacatcctccaaaaggtggtgatgacagccttcgcagaccgcactgtggtcaccatcgcggtaaggggcccattgatggggtgcagagggacacccagggacaggactggcctgttgtggccgtcatcagtgcacagcccctgggcttgcctggtcccagtaatcaagaaagaaccctgaagcaggcagttcagggcaaggggcctggagggcatgcagggagcctgggttgcaggatttggggtggggggttttgcccctgtgcttccctcagacctcccctctccttctccaggttccaaggcctgcccctgtcccaaggccttatatgttaggctggcgttacttctccataggaagtgggggaggggttgtggagggtctctgagccttgaagcctggaggtggggtagagttgggacttggagaggagagaagggtggtattagcagatggagagcttgtagtcacatccaccccaggaaagtgcagtccccacagtgacaggacattctggccacatgcctcatcctcctcctccaagccgcaggagggccaccctcagctgtggcccccaccgcgggtggtattcccaccatcctgacccgccccctcctgccctgcccagcatcgagtgcacaccatcctgagtgcagacctggtgatcgtcctgaagcggggtgccatccttgagttcgataagccagagaagctgctcagccggaaggacagcgtcttcgcctccttcgtccgtgcagacaagtgacctgccagagcccaagtgccatcccacattcggaccctgcccatacccctgcctgggttttctaactgtaaatcacttgtaaataaatagatt

SEQ ID NO: 15312 - DNA, 83828 bp, Homo sapiens
gggtggaccagggggtcctcaacaacggctgctttgtggacgcgctcaacgtggtgccgcacgtcttcctactcttcatcaccttccccatcctcttcattggtgagtgcgcgcagcgagccgcggaggaggggacgggagagcagggagggaggaggaggcgctgcgcgccgcaccgctcggcgtccccttccggcccgcgaccgccgtccgcctcgttcccggggtcccctgccctgtgtcctgcccgccggtccccgcactcgcacaccagctcatcccttcactcccccggtgcccccgatcccgcgccaaacacagcggacgtttgtgacccatgggatcaccaagttttgcttctgcagggccaagagctgggatggggaaaagggaaagaggaggtctcagcacgcagtgggaaactggagaggggtcgggcctcaccctccgtggcgcagcttagggagccgggtcacccctcccgcaaggcagcctccctgtcagccgcagctgggcctagggaagagggaagcctgtgctttggagtctgggatggaggcccagctaacccctatgctttcaccgggctgagccgcgcagtggtccgtgatctctgacagtcccaggcccgcgccctgggcgaggagaggcgagagctagggacttggattcccttcccccgccaccccacccgggcatgtgtctccagagcgcaacttctcaggctctgcgcaaagtagctccgactcgccgacgcagcgaccccggcgcccttgcttgcaaagttgggcgccacggccgggacaatcgtgcgtgcctctccactgaggtcccccccatctctctccaagaccttgactcttccagaccagtcaagtctatcaactcatagggtgtcccctgcatccccaaaacgtgttcattcactttaagaaaacaagcaaatcttaaaattcatatacagctttggggaagaaaggaaagattgtcacaaaattagatttacaagaggttgctgcagaagcagagttgctagttattaacaaagacagttagatagaaatagaaataaaacatacaaaatatgtgctcatatgtgcatcaaaaatcaaaaaagaacagcatttacacttctgttctcagccaaacggtttattaacctgatgacttgtcacacaagaagttagtatgtataatggggtaccttggcagggcacagtggcttacatctgtaatctcagcattttggtgggctgtgacaggaagactgcttgagtccaggagttcgagaccagcctgggcaacatagtgagaccccccccgccctttctacaaaaaattaaaaattagctgagcatggtgatgtgcgcctgtagtcccagctactcaggaggctgaggcgggaggatcacttgagcctaggagatcaaggctgtagtgagccgtgatcgtggcactgcactccagcagaggcaacagagcaagaccctgtctcagtaaaaaggtgtggtgggggaggtaccagcataggaccaggctgaatgagttggacgtttagtttgtgtgtaccagccttggggatcctcatgtgtaggtgtcaccctcaccatggacccaatgcccaagcacctttctggggttcatgcaccctcttcctcctccaagtgggcaggcatcctgcctctgactgtctctccctgcaggatggggaagtcagagctccaaggtgcacatccaccacagcacatggcttcatttccctgggcacaacctgcggtggatcctgaccttcatgctgctcttcgtcctggtgtgtgagattgcagagggcatcctgtctgatgggtgagtgactgtctgaggactcaggaaagtgaatctgctccagggtacttcctgaaaggcccaaggagatcctagctcacctatattccacaagcccatgtcttttgttactacatccagcagctcagtgtcttctatgtgccaacctctctgagctgggcactggacgcaagtgagtcccaggccctgccatcagtccaggagagcagagggaacacggacctgcatgccaagtcccagtgaaataatgctagagcctattagaatgccacaactccagtgaaaaatgtctggcctcttctacaacctgccggagttaccttcttggaaaaaaaaaaaaatctaaccatgccacccactcttgcataagacctttccttggttctcagctgttttgaagatgtggtctcagatcctcagcccaccattcaaggtcttcacagtcagccccacctatctctggcctcattccccatgcccaccttccgtttgggcctcacagcacactcctcacacctctgctacagcacagatcacactgtatgttaaagtttatgtctatttgcaaaactgtcttcagagtcagaaaggcctaagagttagaatctgagtcttgttcatctttgtgttcacagtgcaaggcatgtgataaacataaacattattcagtccataaacatttattgggtccttaggagaatgaatgaaaccatgttacaaataagtactctgggaggtgagaggaaggcagaattgggcaagctccatggttgagagggctttggagcggagtctggaagggtgactaggcttcagacacacagaggaggaaggagagagagaactggtggtgcctgagggaagggaaaaggcaccaaagagaaaagcaggtagggctagggagcagcgcaggggctggagcattaaacacaggctggggagcgatggaggctgaggctgggaacccaggttggggcatctcaggaggactgtgaatcccagcctgcatgtttgggtcggatttggtcagcagtttggaacagaagagagatgtcatcagcataacacttttaggtgggaacctgaggtgttcagcgcaggctggaggcagggagaatctagaggtataatagaagcaggacttagcattgactgcagtagtctaggtgagcaataactgcagacagaaatggtgtgtcagcagtcagggacagaagaggagcgggagcagccatctcactaaggaagaatccagtaaccagcaaggatgagagactgccaggagagggagtggtggaggagagggatatttggcttgagtatctgaggtccagcgccccctgagctggaatcagattatacccagactgcactcctgcagtgctgcctggctcctgtagttggatggcaggggataggctccctcatcctccctcccgttccccaccttcccttccccaatgtccctgcatcctggcttcagcagtgatctctaaaatacctgcttgacttggaggcagcagctctgcctgcttattaaagtccctagaccagcaagaagaccagaaggcatactgctacacaagcacgtgacaagtccgcctccacccccacccctacaccccttccaaagtagcacaaatgccacagtgagccctcagatgggaaatactcaccagatggtgacagagaaagacacctccgcccttggagaaggaagacctgggtcttcagtgagcactgctgctgtgtaccagctatgggactttgcacaagtcattcaggctttctgggcctcataagcatttataaacatacgataaaacattttagttgccaacttaaaaatgtgtgagaaagtataaggtgtttcaaaattatttcaaggagtaaagaggcaagagttttgaagatccctgggcagggtgttggctgttcccagtgtggccattcatgactgctctctggccttatgaaacaagcatcatagtccctggcttgcctgcttcatggggctgtggagggtgaaattcgagcatggacagggtgcagagcccggagtggcagagcactgggtagactgtgtattcccagaatgtgggaaactggaatgaatcggtccagggatgccctcctgctggctgtcagcagcccctcctgtgtgtggctgtactgcttcagctcagtgcaaagggccatctcctccccagggcacagatcagctcaagctgagtaattgtcatctggtctttgtgagctcctacccccaggcctgagtgaggggcaggaaaagagcagacaggagaagtcacagacccttgtgatacctccagtctaatccagcctgggttttcagagctgtctggaaatttagggggcaggtgggagggggctgattaaggcagccctgatttgatttagagtgagcctcatttagtgactaattaagccatcttaaacctgtagggcttcccctcttcctttgggtattatttctttctgtgatgttctgaattcagaacaatcaaaacagtataagttagtgaagaagatattttttaataactacaatattttcccagaccaccatacactggataaagcctgtatataaaactttacctaatttcttaactaattgaatgtgtattatttaacaaagcagctaaaaactattctatgaagccatgtcatgaaatatttagttcaattatggttaatcctcatcttatttcgtcttataaaattttaacatttctacctcctattgcaaaaaaaagcatttatatcagcatataataaaacatgtctagatgtcagcttaaaaatgtgtgagagagtagagggtgtttcaaaattatttcaaggagtaaagaggcaagagttttgaagatccccaggaagggtgttggctgtgcccagtgttgccattcatgactgctctctggccttgtctgtcttgtaccttctatattagtttgaagaccttttttggagaatattcactaaagaatatcaatatctaccatttcattaaaaaagaaatgtggagtttgccttttcaagttggtttgatgcttattgatgttttcagggacccagcctcttcccatctttccataccatcctgtgtgtgtgtgtcagcctatcttccccatggtcacaaggtggctgcctagctccgggtattgcttagcatgagcagagagggcatgctgccgacatgcctctcctttatgacagagatcattctttctttgacatctcactggccagaatacgtggaccaacactggcaaaggagtatggaattgcatggctgcttaaaccaatcaccatccattccctggggctgggtatattgctgctggagcaaacctgtggtcctcctggcacagaataaggggaagatactctttggtggacagcccacattgcctctacacttgcacctcagtcccaccagacccactgaggtcacaggatagctctcctcatgtccttcctccttctctgttgaactcttatgtatccttcaaagtccagcctggtgccacctcctctgggaagctgtccttggttgcccaccccctcctttgtgctctctcagtctctgtccatcggcagtatcacttccctagcctgctgactccaacagttagctctgagcatggcagccccctccataccatcagcttctcaagggcagggacccttggcacactggatagaagtagcctggtgggcaacagcagcactgaggcagcaagctgtagcaggccatctgggaatggagtgggtaccacagggctggagcagaaagggcaggctgggcagatctgataaagtggctggaggccacatagcctgggcctttcgttccaggctgagcagagtgggttttgctgtctgcaggagggagctgtggaagggcatgatcacgaccaactaaggtgaccctcctcaccaggcccagggaagactgaggcctggaaggaggctctggctgcctctgggtcttacccccaggccacagtccacccacttagaggcctctgtgagttaaggtggagagactatgagctggtattgactgctccattccccatcccgagagaggagacaaaatcagtgaccttggaaatgcctcttcgtgcctcagtttcctcaccccataaaatgggagactaagagtacccactcgatggggtttaatgaagattaaatgggttaacatatatcgcatgcttagaacagtgcctggcacagagtaaatgctccataaatactgactctcatcagtttgttatcacagcctctggggagggcgccagtgctgacttatgctgttcgtgttaaatggggctgtcactgggtgagttgtggcatacaggcccctgcactgttcaagagaccccagcaacccttgtgcttagggctcagcacatagtaaggcctccagatcatatacccagctctactccatgtactggcagctctgcccagcccataccccaaatacgcccattaactaaagggccctgcagcctataaagtgatgctataaaggttcagtgttcagcctttgaaattcaaggcctgggctgctctattgcagtacttagcatgtccccatcctgtctgtttctctctcccatctcagggtgaccgaatcccaccatctgcacctgtacatgccagccgggatggcgttcatggctgctgtcacctccgtggtctactatcacaacatcgagacttccaacttccccaagctgctaattggtaggtgaggtgtaggagggaggggcagtaccttcattcatttcttcagataatgtttactgaggactcattatgtgccagctattgctctaaacagtagagatttggaatagaaaaagaaaaaaatccctgccttcatggagcttacagtctggtgaaggaggatagacaggcaaagacagtgaataaacaagcaaacaaataggtggtggggatgctatgaagaaaatcaagctgagtaaggggtaggggcaatgacaatgttgctatctacacaggatggtcagggaagggctgtggtaactgtgggcatgcagatatttgggggaaggtattccctgcaaggggagtgacaagtgcaaagtcctctgatagggatagatttggcaaagatgtcactgtgggcaaagccaaatgagcaaggggaagagtgggaggtgagggcaggcgtcaggagaggagcgagcaagagtcccaggctctgggcctgagagcctgggtgaactgtggcatcaataactgatgtgacagaggagggggaggtgggctgtggtggggataaagttttctactgggggcatatcgagtttgagatgtcacagagacagccaactcaagtgtcaagttgggctttcatggggaggtcaggacaggagctacactttcaggaggtgggccttgtagatgacatctaaagcttgagcctggggctggctgccgtggctcacacctgtaaccccagcactttgggaggccgaggtgggcggatcacccgaggtcaggagtttgagaccagcctgaccaacatggagaaacccccacctctactaaaaatagaaaaattagctgggcatggtggcacgcatcggtggtcccaggtactcaggaggctgaggcagtcaaatctcttgaacccaggaggtggagattgtagtgagctgagatcgcgccactgcagtccagcctgggtgacagagcaagactccatctagaaggaaggaaggaaggaaggaaggagggagggagggaagggagggagggaggagggagggagaagaaagcttgagcctggatgaggtcacctggggagagaagagaaaggctctgggaccagagcttgaggtttgctaacatttagagagactcgggaaggactgcccacttagagcttctgagatgttaaatactgcaggactggggtcccaggcagaagcaacaggatgatggttggtgtttactgagcatgtgccatggggcaggctccatgccatgttccttacattcattgtcccacaggctaattcccccagcctccttattggtattgttaatatccccattttccagtgtggaccctgaaactgagaggttaaaaataataacagtaaatactcactttgtacttactgtatgccaggccccatcctacctatgtgatatattaattcatttaatccttgcaacaactctatgaggtaggtaccattattattttccctttacatatcagaaaactgaggctcagaggttaaataactggcactagtctagctcgtcaaggggcacagccgggagtctagcatctgtgcaatctcctaatcatttctgagactgcgtgtctaagggccctcagacttcgtccttggggtaaaggtatcaatccgcaggtctgcctctgtgttggggttcagcctgtgtgtctaaggctggggctgtacatctggcagttagactttgttcacactatgtccttaagtcagactgatttttaggtatcacagcatcgaattgacatttggagtctggcacactctgtgctaagccagtgacatcatggtgttgtcagggagtacagggtgtttcttgcactagtcacaggtctgcctttctgtagaaggtgggatctgagctccattaggattatccaggtgatccccctacccctagcccaggggcccccacatgagtatgaatgggagctgggggaagcaggttgagaggggagatgttaaatacaggcttcagagagccaccctgcttccatttctgaagtagctccttgtctgtagagaacccttcattaaccagggcctggctgaccagtgtcctctggaaacaccctgtctggacatctgaggagttcattttctcattctccagcaaacacataatgttctctctttaaagcacaagttatcacccgtggatggatttgtccttttctaaggaacaaagactaactccctccattccccttgttggagttatctccccttgaaaggacactccacagagccagaaattctagaacagggaaaagtggaggggacgtgcctgtgaactgcagggacagaaggaaatgggtattgggagaatggccagccctccaaggggctgatgtctggcctgggtatggagtcccacagaaaggggacctgtgatgcagcttacattgtcccgtgagggaaccatgatcctggaacccagatgaggccaaggaaatgttctctgaaaaagtcatatttgagctgagaactgaaggaactaactgggagaagggaggaaagagtgcttcaggcagaggaaacagcatgtgcaaaggccccaaggcagaaggaacaaaacacattagaaaattcagaagaagaagagtggcgtgggtgcaaagtggaggggagctggactttgggttttgtttgcttgtgcccaggctggagtgcagtggcaccaccttgggtcactacaacctccgcttcctgggttcaagcggattcttgtgcctcagcctgctgagtagctgggaatacaggcgtgtaccaccacactcagataattttttgtatttttagaagagttgggatttcaccctgttgaccatgctggtcttgaactcctggccttaagtgatcaggtctcaacttcccaaagtgttgggattacagccgtgagccaccgcacccacctggaaggtcataccacagatgtttgcctttatcccaacagcaatgggaagttgtgtgtgtgtgtgtgtgtgtgtgtgtgtgtgtgtgtgtgtgtggtttaacatgtttaacataaaatttatcatcttaactgtttttaagtatagtgttctgtggcattaagtatattcacagccgggcatggtggctcatgcctgtaatcccagcaccttggcaggccaaggcaggtgaattgcttgagctcagaagttcgagaccagcctggccaacatgccaaaaccccgtctctacaaaaaacataaaaattagctgggcgtggtaatgtacacctgtagttccagctacttgggaggctgaggtgggagtatcatgggaggctgaggagagaggatcagttgagcctggaaagtggaggctacagtgagccaagattgtgccactgcactccagccaagattgtgccactgcactccagcctggacaacagagtgagaccctgtctcaaaaaaagaaaaaaaaagtatattcacagtgctgtgtagccatcaccactatccatctccagaactttttcatcttcccaggttgaaactctgtactcattaaatgataactccccatttctccctccttacagcccctgacgaccaccattctactttctatctatgaatttgagcactctaggtacctcatctaagcggcatcatgcactgtctttttttttttttttttttttgagatggagtcttgctctgttgcccaggttggagtgcagtggtgcaatctcggctcaccgcaacctctgcttctctggttcaagcgattctcctgcctcagcctcctgagtaactgggactataggtacctgccaccacgcctggctaatttttgtatttttagtagagacggggtttcaccatattggctaggctggtctcaaactcctgatcttgtgatctgcccacctcggcctcccaaagtgctcggattacaggcgagagccaccttgcctggcctatttgtctttttatgacttgcttatttcactgagcataatgtcctcaaggttcatccatgttgtagcatgtattgaaatttccttcctttttaaggctaatattctactgtatggatatgccacattttgtttatctattcgtctgtcagtgggttgcttccacctcttgactcttgtaaatagcactgctatgaacatgggtgcattgaggggttttcgacataatcataataattgctttatggagaccagcttggaggagaacaagatggggaggaagtgtggaaaccaatgagaaggctctcagggtatagcgggaatacagaggacgcatgatgatgcctggacttaggtggtaccacagggatggagagaagtagatagagtcaagctatttaggacgtgaaatagacagcatttgttaatgggagaggtgtggggcgagggagaagaatagagggagaaggaggagtaatgggagctcaccagcagcccccatgttatgcctctttccttccttttccctcttctctcatcaggcattcagcttttgctgagtacttctgtgtctgacaacaggctgagcactcagcactgcaggacaggactatgcaaaaaacctctgggcctagtcctgggtgcactgctaattccctgtgtgaccttgcacaagacatccaagctctctgagcctcggattccccacctgggcaggaagagtaagtccctgcctaagtcatagggttgtaatgaagagcaaagcagaccatatctgttaagtgttagggacaagacaagcatgaggcatattttcaagtctcggctcctgtaggcagctctcactaagggctaaagggcttctgatgcctgggatagaatctgtccggcagagtggagtggaggcagggggacagccttcagctgtggaattcctccagtcctagagaccagcctgagctgggggacattattccagtcctgaggcatgagagcagaaggccgatgcttctgccctccatcctaatgtcctcctgcagggacccaaggtggatggcatcgatccccccgggtgagctcagccctgggcgcatggtggggcccaacatctcaacctgtttcctaaccctgagccaggcaggacagatcccagatttgtgcccaagagatgctctggcatccatgcccaggcccacatagggatagagggcagggtgaaagtctctctccctcactcgggtcctctggagaggggctctgtgtcatgaagctgaccttatccgcatctggtctaggagggaggagggaaggagctgccagtgctaaaatctcccccaccctcaaagggggacttcacaggttattgctggttttggttgttggaagctgacagtgatttattggcagattgaagtgagtgtgtgtgcgagaatttaggatagaatctactgatagcttctgaggtttaccttccccaggtcttaaatctggagataataaaaatataacagctaatgtccaaagagcacccgctgcgtgtgaggctcactgcactaaatgctttccatatgtttctcacaagaaccttctaggtagcactattatgattcccacttaatggatgaggaaactaagctctagaaggctaagtgactaatccaaggtcacacagctattatgtcacaggctctgagcccaggtgtatctggctgcggagccaccaccactaacccctgtataacgctgcctcacagaactgtggctggctctttccgtatcccccatgcccctgctccatcatcatgctgtggtgggctctgaactgtgaggacagggatccaggctttcaccctctctctgtccctagctgccagtgcacttgggcaaggtcacatcctatttctgggcctcagtttcctcatctgtaaaatgaaaggctggattgaatgacctttaagatttccctcacttggaaattccacaagtaagtcattatagcatggagcttgcatgcatgggctccagcgtcaggccagcccagctctgccagttaatgggtgtgtggccttggatctgttacctaacctttctgagcctcatttcctttgtctgagaaattgggggtgacggcagtgtactttctttgaaaagttatggtgaggaatagataagatcatgtgtttaaagtgcttacttggcacagtgcctgtaacttagttaaattcaataaataaatttcccattcttcccatgatcatttatttttaagggacatttgtctgaccagtttgatttatgagattattggtgtttttcatgaatgttaagacgtacgtgcgtcatcttagagtcatgtactctgatatattcacacgtgcacatccacttactcggaaatgtacacacccaggcacgcttattctgtctccttctctgccacatacttgcacacattatgtgagtgtacacacatgatgcacacacgtctctgcgatcttccatctctcctcggcagccctgctggtgtattggaccctggccttcatcaccaagaccatcaagtttgtcaagttcttggaccacgccatcggcttctcgcagctacgcttctgcctcacagggctgctggtgatcctctatgggatgctgctcctcgtggaggtcaatgtcatcagggtgagggtaagcaggccacctgggccagggtggggtgggaagcagaggctctggcctctgtcctgccctgggttcaggcccccaccctgcttctcagccaaactgagaagggatcagcttgttttacccgcccgtgtaaaggggagtggggccgtggcggaaatttcaggatagacactgcatctggcccacgtgtgctctaccccagggtcccagagggagaggggggtgatgggtgtgttcgctgaggttggcggatgactttccgtagaaagggaagataagcatcaggcactggcctctcctactttctttcttcgggggtgggggactttgctttaatgtattcatatcgtcacgctggtaaatgaatgagtaagtgttttgttttcctttctgtttgctcccgcctccctctctcttcctcaccccagactccaaccttccccttcccctgcccctacctccccaggcagcccagactaatgaactcgtttgtctttcccatgctttgtttttattagtataataccatatgtgtctgtctaaataaatacctattcaggttttttcctctcaacacaagtgaatatgtaggtttcccccacggtatttatcttgtaagaatgggatcatattatgcagttttctgcactgtgcttttctcacccaacaaatatctcttgggactccctccaagccatctgatatggctaattccgttttcttaatggctgcataatattccatcgtatggatgagccataatgtgttcagctatttctctatggatgggcatttactttgttgccaagttcttgccttcatgaataatggtgtgttgaacatacttatatatttatgtattgctgcttttatttctatgggagagagtccaaggaatggcgttgctgggtcaaagggtctgtgtattttaaattttgatcagtgttacatattgccttccagaaagactgtaatctgccagcaatgagtgagaaaaccctttccctgccttccaaccagcagtgagggctacagccctttcgaacttggactgcctgcatttctctgactcttctgcttttagttggtgatctgcagggcacaaagctccttatgtgtccccccatccagtgaccctcacaggaaccctgtgatgcaagcaccatcccctttatagatgaggaaacattttagatgaggcttgtccaaaaacaccttgctagtaagtggaggaggcaggattcaaaaccaggtctgcatgacttggagttctgtgaactgtatatgaaacatggtggtatccttagatctgtggagaagatagcatatgagagattcctgctcctccccaacccaacctaaacccaacccagcctagccatggggggttcaaagtcgacctcaatgagcagttacaaagtcaggatgccctgacattggtggccaagaagtgttggggaatccttttcctggtaataattacaggcgaaagatggccccatctgttagagatcaagtgtggaatatcacaaccccagatccttgctggggcaaggtagggagtggtgagaagttggacttacccatcccccatggcccatgtgccccacagagatacatcttcttcaagacaccgagggaggtgaagcctcccgaggacctgcaagacctgggggtacgcttcctgcagcccttcgtgaatctgctgtccaaaggcacctactggtggatgaacgccttcatcaagactgcccacaagaagcccatcgacttgcgagccatcgggaagctgcccatcgccatgagggccctcaccaactaccaacggctctgcgaggcctttgacgcccaggtggtcagtgggggcacagccacaccatctattcactgccttctggtttagggtcacagagagggacctcaaagggcattaggtcaaaatcctggtgggacaagaggggaaactgaggctggtgaggggaagaagcttgccttaagtcacacagtgaaccagggacaggtgcagggctgaggattcataggacaggcacagttggaatggcccttaccgtttaggtcgtctagtccaaagtccttatccagatggggaaactgaggctctgagaagggaagtgaccccactggactctcacatccctgtgctctttcctctgcagcttactgactataaaggttggagtgttcacttgatttggagcaggggtgttagtggcctgatccttatggtaactctatgagttgagccagacaggaatctccccatatcactgaggagcaaattgaggccctgagaaaggctgtgacctgcccagagctggccacagctggcaggcggcagaggcagtctcctggctcccagtccagtgctccttcacttcctctgccctcgcaccagggcagttgctgaggcagacacggtggcaggtggtaatgagtgagtgtggcacatggccacctcctcattccagtgctgtgctcatcacatagtccctgaccagctgtgtgaccttgagcaatcatctggccttagtttccccatctagaccatgttggtgttgatagggccctcccaactgtgcacttgctgattccatgatctcttcctggagttcacctatttgcagaggatgtgaccactgggtttccccagacaacaggagctaggggcatcctgggaggctaggcccagccgtgaattagccctcaggcactctgacctggccatggtctctctgggcagcggaaggacattcagggcactcaaggtgcccgggccatctggcaggcactcagccatgccttcgggaggcgcctggtcctcagcagcactttccgcatcttggccgacctgctgggcttcgccgggccactgtgcatctttgggatcgtggaccaccttgggaaggagaacgacgtcttccagcccaaggtaggcagccccaggggtagggtaaggcaccctctagatggttttcagttgtttctgagagtgcaacaggccaatgtgtgtgagccatggccacactggagtggctcctcacacatgcgcaaagcccatagcagtatccccaccacagaatactctacatctggtcaacagaaatgccagagggcgagcctatgccccaagggtatcctactctcctctcaccgtcactaccatagtacctctcccggtagttaggtcagtccgaaaactgcaggaagtgcttttgtttgtccagtgtctagagcttctgtgacttggatttgttggctttcagttcatgtcatcttagtaaactctttaaaagttttcaagatctgtcttcttcagtcctgtaaaggctggcacttgagctttctgcaggggcatcttgggagctactgtcagaggagagagaagtgggaaaccctcacgagtggagctttgtctctccccactccaaatttcattcaaagctgcccgtagttttattaatatgttggacttttccattaaaatttcttttttaagaaaagtttccatggcttaaaaaacactggagacttattagactagattatatccaatggccttggcagttgtaacgattctgcaaactgaaatttgttggagctagaaaacctttccccggggttatttgccctgcgtggggccgtagcatccacttcgggggctgggcagactgtgctctgttgtctgtttccttgcagccgtttaggtttaaatggccacaaaatgaaaactttttcacccctaataagtttcagagttttagtttccaagtgaggatgtcattataacattttaaccacagacagtctgaaaataatgcagagaatggggaattagggtttttaataatttatgacaccctttgcgtaacatttgttcatctcatgagctccaaaatcgcagccagcagttaatcctcaggaggtttatgttcatttttctggagacataattagtcagctgaacagttttggccacagatatgagatacgttgagtctgatttatgcagcaaactttcattgaacactgctgtgtgccaggcctgggttgggctgtgggaatatgaaagcaatagttatgatgaggatgattaacaatattaacagccacttactgaccacataatacatacctggctgtgtgcaggagttatccatgtgttatttaatccctaaaactatcctttggcgtgagtatattttgcaacatctttactgtggtatacctcaaatactgtacagtttatgagatgataggtattcttatccccattttacagatgagaaagttgaggctcagaaagtttaagtaattttccccagggtctctcagctagttaataacagaggcagaatttgaacacaagactcactccacagtctgggcatttacagccaggaagctaaattgactattattatcaagccatcacctctggctccaaggattatgaaatccaacagtgaggagagaaatcaaaataaaatacttttatgctatgtgttacatgtgactcttaggaggaatattcagggaattgtgggaaaagatagtgattaacttagccagtggtcatgaacagcttcatagaggaggggatgtttgaaaggggtcttgacggatgagtaggaatttgccaggctgccatgggaagatttcttgctcaaccaagaatgcaaggaccacttttgcttatttaaactttgatggcttttgaagccatatctggctttttgagcctctctactttacctggcccataaaagagaggggaagcggctgcttctcttgtctacaggagtgtcacctttggctctagcctgaccataggctaccccagaatacccccattggcgatcctgaagcagcatggagccagttgttaatatcagggggaaatggcacaggccagagcccttatcagagtgtccacaccacgctcttcttcctgtgtttcccaaaacccttgtgggattctgctaaggagagagctctgaggcaggacgtgccaaagagatggcgaaagcacttagaattttagttcatctgaacgttatcattgccgtttttttctctttgtttatacacaaaccctggggtttattaccgtctcattggaatgctcttgtcccagttacttagcacacaaatccctgagacagatggccctgcctcagtggcagtgggccttatcagatttaatattttttccctgcagcccaaacacaatcagaaaatttccgacacagaaacaagagttgaaagtaaatatagtctccagtgtccgcaacaaagaactctccatcatgtggttgcctgggatgtggcttaattctcatgtgggcttctgagctcagaaaatgggggaaagggatcatttactgagatcatttggttcatctcccagcccccaagccattctaatccagagagaaccgagtgctattctggtctttatgaatgacaaagaaggaagctccctagctacatgttgcagtgtttcacagtctgggagaggaagccgttttttctgcccagcctgaatccatcctgcagcagttggcacagcgaggcacctgtggtttattcatcatcactcttccttcctaagatactcagagttggcaagaaacatgtcatccttggtatccgcaaggacgaacatttctgatgtcctctttagttactgaaagtgtctgtgacttgccagatctttgatgctcctgtcaccccgctgccactccccagggaaagctgggacccaggttgggctctgcctatgatctatagctctttccagcctcctctccaacccaacccctactcccaatctgtcacctcccatggatgccactgatctggctgaaggacaagagaattagattcataatgagctgctggtgtctgaaacctgccagcactgccctgggctatcagttgagccaaaggaagaaggaacagtctgggtttgatcgaagggctaaagcttcaaacagcctctaagtctcagtaggaaaatgtgtaggtttgggagggtgtatgtgtttccgaatgagttcccctaagaactgcttatggttctatatgtgtgttctgtttgtccctgtgtcttttggtgtgtctttttctgcgtgtgtgtgtgcatgtgtgtgtgtctatgcccccgtttggattgccatatttgtggctatcattatgagtgacttaatgagtgtatatgcattggtgtttctgtgactttgtggttttgatgcatgggctggcctcttcataaccatgtccatgcagctggtctggcctagagtacctgccttcaattcactagctccttcttggccatcaagactctgctcaaatgtcacctgctccagggagccttcacctggttgaattagatgccccttatctgtgctcacataacatcctatcaaagcgccctgtttctttccctgacttgatcctctgtcccctattgcctgacctctgtgtgcccagcactcagcccactgcctgacacccaggagatgcacgggaaatggttctgcaaagaaggaataatgcagcaattactatatattgagtgcttacacttactgttttttcacatgcactgttacattgacttctcataacaactctctgaagtcccttcatagcctcaccttacagatgaggaaactgaagctaagagaggttgaggaacttacctaaggacacagtggctaatatatgatgagtcaggacctctaagtccaggctcttaaccaccgtgtcaaacagtcttgtatgaatgggtaggtgtgttggtctctgggtggccaaagataattttattctttacccagggcctcccggggctgggacctacggacaactcaccttttgacacctgccaaaataggaaacaagagtccaagtgatcccctctcctttaagcaccagagaacatgtgaaggggacctttccaatcatacctctggcctggcagagacaatggggctccaaactgtagagtcgggagtgctgggttttagtcctacctctgcagctaactcatttattctcctcagcagtcacattctgcaagcctcaaatgcaaaatgtgtaataacttctgtagaaagtacatgggggcatgaagatcattggcttgattgcttttaaaaaatcggtattgagcactactggggaaatccctggaaacaaacacaattcttccctgagagcttgtgaaaatgcaagactagggcctatgattttccaaagcattttcttccaccaagtgtcaggttgtaggtccttggtcttttctctcttgccttggtacctgcagggtgctgaccagtgctatcatatcccctccccgtttcctaggaccctcttctcggtagactccaacagggcctgccttccttgggcagcatggcaggcctcttggctagtctagtacccacttcttttttttttttttttttttttggatggagcctcactctgtctcccaggctggagtgcactggcgcaatcttagctcactgcaacctctgcctcctgggttcaagcaattctcctggcccagcctcccaagtagctgggattacaggcatgcatcaccatgtccagctatttttttgtatttttagtagaaacagggtttcagcatgttggccaggctggtctcaaactcccgacctcaggtgatctgcctacttcagcctcccaaaatgctggaattacaggcatgacccaccacgcctagtcaggtacccacttcttaactgaaacttagctattccaggttctatcccttttaaaccaactctttgaagagaggtctaataatgacccaatgacttatagctgcagtgagatttttattttaacaggtcacaaaattctcaatccacaaaagtagatttctgaccctaggttattttgttgggggcggagagaggaagtcaaaggttttgcagcctttagagctgcaaaaccagaatttgttgttttgttaaaaatgcacaaataccgacgagtatatttaagtaacacccatagtctaacgaacaaacatgatcagttggcttttccagccctcattctccagcctgtgtgttttctgctcattgtaacacagcgtgtgtgtggcattccatgtttctccagagctttcatgagaatcagtggtcttggatgcatagtgttcccatgagtaccttaattacctaaccattccctgtggttggaaatttatatgggtttttgcattctccttctgctctgaccccaaaataaatgtctgtgttcatacagctattaccttatgtgaaattattttctttgggataaattctcatgatgtgttgttgctttaaaatagtggactccagtctccagagctgcgtctctgcagaggacagtgggacagaagaatcccagggcatgttaaaaaggaccgggtcttcctaaacccacatgcctatatttctgacccagtaccagccaggggggcaagtttccatcccccacaagtcacaaacctgtaactgacactaggatgcttaaggtcaaaggcctggacgaggcctagacagtgggtctggggtagtgtttttgacatcactcaggttcatgttcacatgttgtccccttaccagcatgtgaccttgggccagccactaaccctactgaaactcctttttttcatgtatgaaatggggctaataatggtaccctcctcattagggtattgtgaggatagagttttgcacctgataaatattgtctcctgccccttcctcccctggaaattcaggtctctccctgcagcctaattttaaggcccatttttctgcttccagcccacccctgcccttctaccttcgacctcctccctctgcctctccctctggtgcactggcaaatgggacagagagcctcggtagggccttcctcttagagtcttgcacgcatccctcagtggtctccctgtggctgcttcctgctgccaccaacagatacagacccctgtcgcacagatcatggtagagacagtggtgagcaggaccagacagctccagggagcagtgagggctggcttagagaacctctgttaaactgagaggccaccatcaggaagctctgatccaagatccaggaatccctgactctagggaaaggcctccaatgagagcctgggccctctctgcctgattctgattgtggatgtgccctcaaactccttctcatcactttgttccatccctctttaccctgcagcagctcccacaccctgccaaacaggatgcacagtccagggcagtgtctgagaaagagcagagatctgtcttcatggaaatattgatgtggctctgctggggagcaatggatttatcaagatcaaagttttcctgggagttattgatgcttaatttggaaatagacacactgttgatccctggtatctttagcaacaaagttaaaatgtttgtttttcttcactggttgccatctgagatcttgccggaagtacacaagagaaccttaaatttaacaggaggccctgggagcccatgaggctggcgggcttgggtctgaaatcttttcagtctcttgtaagtgatgagctctcattctctcctgagagctctacggtgccatgttttccactggccttttctgctcagtaattgctacattacaggctgttggtaagttcggaacaagggagctgctgattccatttctgtagcagagaacatgcaccgtgagacttgttgtaccagttcaggttttaggtgctctatttattcttgccccattcagaatgctctcccctgggtctgtggccacaatgctaagagtcatatttatgggcctgcagttgtaattgggccccattctgttcccccaagtggaaagatgaacagggtgtaagcaaccttccctgtagttagaaaaacgtttagttggatttatcagtctgatttttcactcataaacaattgcacaagcctttgcaagcccagagggtcttgtaataatgatggccgtggtccattatggcacagtgatgtgttctacggtggtcattttgctggcaatgacagtcacctctgaacttctctttccaacagacacaatttctcggggtttactttgtctcatcccaagagttccttgccaatgcctacgtcttagctgtgcttctgttccttgccctcctactgcaaaggacatttctgcaagcatcctactatgtggccattgaaactggaattaacttgagaggagcaatacaggtacttggatgattattttttcactttgccataagaaccattattaggaataatgtccatgagtgttattcatcctcatggacactcaagaataattctgctgtaaatttattttttgttgcccattaacgatgttttaaaacagtaaccattgacaaggcagtgtgggatagtggaaaatatcttgggctgaacttgggagacagtgtagctctggctctggttctgccttggactgggtctgaaaatccagctgctcagcccttggcttgaaagtggtagacgtcactaattgatcacagcactctttctgaccaagggtaaatgcaaccttggaatcctctctaagtggctgttccagagttctgctaccagacagtcttctttgggtgtgaaaaaaggaatgtgcttgacatacaaggtctagatagcctctaagacagggtcccctctaagatggggtattggtccatggcctgttaggaactgagccacacatcaggaggtaagcagtgggagcaagcattactacctgagctctgcctcctgtcagatcagcggctacattagactctcataggagtgcgaaccctattgtgaactgtgcaggcaagggtctaggttgtgtgttccttatgagaatctaatgcctgatgatctgaagtggaacagtttcatcctgaaaccatccctctcccccaggtccatggaaaaattgtcttccacgaaaccagtccctggtgccaaaaaggttgaggaccactgctctaagttctatttgaacccttaagtcttgctcactaatgagagtgacctatttggtctgttgggtcacttaagtctaggctcttggtcctgccttctgtgatttccttcttagagtttctggaaagatgatcaaagccagggagtgttcagggcccctctgaagaaggtgatgatgagagttgtccaagtcccagggtcttcactaggattttggttcagctatcagactagagagacatcctgattgagagtagtttaaatgggatagaagtttgtttattcttcagatagagtcagggctgacacaggagctactcaatgatcagagacctggcttcttctgtcatgttgctctgccagccttcttttgtgacttttgtctccatagccatggtgggtattgaaactgccactatatttacatttaaactagccagaagaagggacaagaggagggaacgcattttccttttaaaatggtaatacctgatttgcacataccctctcgcatcccattggtgagaaagtggccaaatggccgtatctagagagtctagaaagagcttggtctttattcttgacagctatatatgcactgctagaaattctctgtgcaaagaggagaatgggcattgggaataactagatgcagctatgcctagtgatgtccatgaagttgtggtaaaatcctgaagctaccttgttctttggaaatgttcctcagaatcattaacattagtcatgtgggagacaggagaagaagctctgcagaaaagggaccgagaggacaaggatatagcttgggctggggacaatgtcagagtccaaactctggctatcttggaatagtctgtgtgaacggtgccctcccaagttgtgcagtgcacaacctgtgcagctatatatggcaaccctgcccatccccagtggtttctcactgggaaagcagagtatttcctcagggatgtcattatgtgacaatagtggaaaaagcccaggaaaatctaagaccttctaagactcatgggggcccagagctgggaggaaccaagctgttgctcagttcagaaaacttctctagaaatcccagcctctcctcacacccctccagtgacaggcagacttgcaccaccacaagcaacagccacttttgtggttgggcagttttgtaattaaatatactaatgtgtgtatgtcataaattacattttccaattatgccaaaagagccaaaaatggttttttaatggttagcatataatcgtttttatcaaattgcttgaatctttcatgttaataagagagattcattactatgccacaaaaagcaaatactggcattaattatagaaacaaattaggggggtggagcgcaatggctcatgactgtaatcccagcgctttgggaggctgaggcgggtggatcacaaggtcagaagtttgagaccagcctgaccaacatagtgaaaccccatctctactaaaaatacaaaaattagccaggcatgttggcgtgcacctgtagtcccagctactcaggaggctgaggcaggagaatcgcttgaacccagcaggtggaggttgcagtgagctgagatcgtgccactatactccagcttgggcgacagagtgagacttcatctcaaaaaaaaaaaaaaaaaaaaagtggctcatgcctgtaatcccagcactttgggaggccaaggcgggtggatcacaaggtcaggagatcgagaccatcctggctaacatggtgaaaccccgtctctactaaaaatacaaaaaaaaattagccaggcatggtggcgggtgcctgtagtcccagctactcgggaggctgaggcaggagaatggcgtgaacccaggaggaggagcttgcagtgagccgagatggcaccaccgcactccagcctgggcgacacagcaagactctgaaaaaaaaaaaaaggaaagaaagaaggaaaggaaaggaaagaaaggaaaggaaaggaaggaaagaaagaaagaaaggaaagagagagagagaaagaaagaaagaaagaaagaaagaaagaaagaaagaaagaaagaaagaaagaaagaaagaaagagaaagaaagaaagaaaaagaaaagaaaggagttagggagaaaaaaaccctttctttctttcttttggagatttccggaaaatgtacccttacggatgagagcctgtgtcttcatgggttagagaataaccacgctttgtgcataaaaagttattaagcacaattcctgaattatacataattactagctgtcagtcagttgtgcatttctgtgtatgctggtcttcacttaataagactttatttcacagatcacttggtgtccctacttcactgaaactaggtgattatcttttgaagtctcatttcacataacctaggaggtatatagatttctttaaaaatgtcattgccattattttaaaccttacccatggtatatataaacttacagaaagacagaataggttcattattttaaaccttgcccatggtgtatattagctcacagaaagacatagaataggttcctgccttaagaaaacctgacccacaaaaaagcctgggtttacacaaaagaggaattaagggcggggagcccaccttacaacagaatgaataatagaattttatccaagagcaggcatcctgaggacatttaagacccggatgcatttttccttgttcaagagcacacatccaaaaattgcagtctttctgcgagtcatgatcactctgcacataaagcgtttaggttcagagctcggggaggccattaccatggctgctctctgtctgccctgtgagggtccttggggtggctgcactctggggatggtgctggggctgactgactcacgcggtcgtgtaacacatcagaccttccaaagtcgaacccttgttttgtttcaaggctcaattatgacaggacttggtctcagagcagatcccctccctaggctggagaaggccactttaaaacagatggcctgccccacttcatcatttttatggctctgatctgtgttctccactggcctctggtaaatcaagaatacaagtggacatgaagatctgctttaaaaaataaagaacagaccgggtgcggtggctcatgcctgtaatctcagcatttggaggccgaggtggatggatctcctgaggtcaggagtttgagaccagcctggccaacatggcaaaaccccatctctgctaaaaatataaaaattagctgggcatggtaggcacgtgcctataattccagctactccggaggctgaggcatgagaattgcttgaacccggaaggtggaggctgcagtgagctgagatcatgccacttcactccagcctgggaagcagagcgagactctgtctctaaataaataagtaaatgaattaaattaaataaaaataaagaaccaattaagtcctgtctacaggaaaaggccttacttgctggagaagtagcttgctgtgctggagtagactagtaagttggaacggtgatacagtaccaccttacagagctgctctagggcaccatggggactgtctgagaagcccctggcacactgtaacaggtggcatctggtgtggtgatgatgatgagaatgatgatgaatgtgaaacactctgctctcatttctagaccaagatttacaataaaattatgcacctgtccacctccaacctgtccatgggagaaatgactgctggacagatctgtaatctggttgccatcgacaccaatcagctcatgtggtttttcttcttgtgcccaaacctctgggctatgccagtacaggtactagatgggctgaggggaagggaggggggcagcaggacacacaaccagaatctgctggtccatggccagtaactaggagcacaccgtcttccactccatgcttgcctgtacctttcacacacttggctataccacaggctgtacctctgggtccctcctgtcccatactctgcaagcactgaccatctctcttaatgaccagagaaggcagtatcattaagactttaaaaatggagccaactttataaactatagaaaaatcaagccaggttcaggggctcacacctgtaatcccagcactttgggaggctgaggcaggaagattacatgagcacaggagttcaagactggcctgggcaacacagtgagaccccttctatgcagaaaaaaaaaagaagaaagaaaagaaaaatcgtacatggaatgcccacagatcttaaaagctatgttgtagcaaaatatttaattacatcaaaaagtgttagtgatgtatttttaagcaaaaagagtaagttacaaatagtatatgttgtatgcttactactaaactggaatatatgttatgtatacatttgtacagattcacacatgaaaaagaattggaaaatcacatagtgggattataagtgatttttattttctttatgtgtttctaaattctctaataagcgtgtataagatttggaaatcaacaacatgatacttttagcctaggcaacaaagtgagaccctgtctgtacaaaaaattagctggaagtggtggctcacaactatagccccagctactcagaggctgaggtgggaagattacctaaagtccaggaggcagaggttgcagtgagctacaatcacaccactgcactccagcctgggcgatagagtgacaccttgtctcaaaaacaaacaaaacctggtgttttttagccagatgtggtggtgcgcccctttagtcccagctacctgggagtctgagatggaaggattgcttgaccccaggagttcaaggctgcagtgagcaatgatcacgcccctgcacttcagcctggacaacagagagactcctgtctcttaaaaaataaaaataaaaacgttaaaacatggtatttttttaaagcaagacaacctttggtgctggctcaggaagaggtacattaccccccaataatcagaggagaatcgtcagcatgattgatctgacctcgggcttcatgtgtcccatctcccacccggagctcttccaccacagagtctgatcctgtcctatgcctgggactaaatcttcaccctggtgttcaggccagaaaccgaaatcccagacccattcccagagggcgggaaggttccaccgggagagcttgatgtagcagaaagtgacttgggtgagacaggctgattcaaatacttaacctctctgagccttggtttctttatctatgaaatggggaggctgcccaccctctggagttgctatggcaattcagttagataatgtaagtaacacagcaggcagagtggcccccagagtcttcacttcgtaaatatcagatccctctaccttgcacatgtttggtatgagtgaggtgttaccaatccagaatccattgcttcttgggataaagattccataaaccttcatctccagtgatttgtattggtcctccttacttgtaaagcttagagtttaaaaatattaaaagaaaaaaaggggagaggctcccacagggacacagctagacaagatgagatgcagggaatctgatgttcttttttatgggaacagtcatatatgccatcccccattaccacctacccatgcccagactgcccccgctccattctgccaagacagatcaatgactataaaagctacaaaagggcctggagatctcatctagtttagttaccaaccaaccttttatgcacaagactttctaagctgggtgtggtggctcatgcctgtagtctcagccactcaaaaggctgaggtaggaggatggcttgagcccaagagttcgagtccagcctgggcaacatagagagacctcatctctaacacaattttttttttgaaacatgaaaaatgaagatttctgaccatgcttctctcattagttaacactttgggctgtgagggtctgatgcagagagacacagcctgggaggatcctaacatgtacacagcattcaaaaggctacaagacactttctgttgtgtccccttgaacaagcagtttgtaagattttgttggccaggcatggtggctcgctcctgtaatcccagcactttgggaggctgaggctgatggttcacctgaggtcaggagttcgagaccagcctgaccaatatggtgaaaccccgtctctactaaaaatacaaaaattagccgggcatgatggcgtgtgcctgtagtctcagctactccggaggctgagacaggagaattgcttgagcccaggaggcggagactgtggtgagctgagatcgtgtcactgcgttccagcctgggtaacagagcgagactcggtctaaaaaaaaaaaaaaaaaagaaatcaggttttgtctactaaacctgctgcacggttaccgttactagtactcacagggtttgttgcacatgcatcgttgctaatagtgctaactaatattaacagcccttgccctatgcctggccctgtcccagcccccctcccttgtataatttaacccttgcactgggggtagagattttcatatctactgatttcttacctttgctcatttatcatggagtgtcctttggttttctgtgtttgtatatacctttaccacttatagatttgaccagcactcaagaaccagtgttactcctgggagttaatacaatcccagccccatggcaaagaaactcatgtggttaggattctgtgtgcagcctggttagccacagggcacgtaaggctttttataatattgacatgagtgcagaagccccattcccgtgtaagccctgagggctcttgtttcataatctttttttggtcacatgcacacagctttattgagatataacccactcatttaaagcatacaaatcagtgggttttagtgtcctatattcacagagctgtgcagccatcatcacaaatgtggaagttttcatttccccaaaaagaaacccgtacccattggcagtcactcctcatcttcgcccccagcccttggccaccgtttatctacacatacttttgaaaggctagtgaaactttctcagaaaaataaatgcttgctcaaacatttgggctataatttcaggggcttcatgggtgcccccctgacatttatcaagaacaccaggttaaggaatttagctataatggaggcctctgtgtttcccagtctcctgggtatcagaggcccagagagggcaggtgccttaccctgggccacgcagtgaaccagtggcagcaccatactcacacatctcctttctgcggttccccagtgacagagttctcaggaagctttttcatttattttctgagaggagggtaggccatcttgtattgatctccaactatatgccagccacaattctaggtgcttatcataaaggttcatttaatcttcacaatagtcctgcagagtggacagagtccttcagagtgggcattataatcaccattttaaagatggagaagctgaaaaccagagaggttaagtaactcacccaagactgcacagcaaaaggctggggctttgaaactcagggccacagactccaaagactatgtcctccccactatgctagatttttttcctaacctgtgaataggagacaaaatagtccttttatttctcacagttgctttgcacactcagaatccatgatttcttctgcatgagggccattcagacctgtgcagaagagagtaatggaccaaggagtcttgggagcacctaggaggaggggatgggggagcatgaggaggagccagggaacagcagcagctgcagcaccagctcccaccccagcctctgccagtctcttggaggtggtgtgggtgcagacaccggctcacaaggtgccctgttagtgagcttggggtgccatgggagccttcttgttgtcaggcccaacccaagctggctgaagaacaccctgatggcctccatttgagcacaactaatgaaggactggatgccagagataagtccaggagggtgatgctgcagggcaggccagggaagagggtacttcatctctatcatggtcctctgcccatccatgccagcatctaacacctgttaaacactgggaggcaggtggtgaaggggccacttcccagcctctaagatacctcctaagccaggaggcattctgtgattaaattacagggcctcccacttactcctttatccttgaggcggtgctggaagcttaatgccaatctggtgtagggctctgggactacaggaccaaggcaagcagtcctttctctctctctctctctttttagctaaggaagccagcacatctgttctttgagaaaaagccctgtatttagaggtgtctgcctttgaaggcaacctgagaaactgtcatcttggcgctttggggactggccatttacacttctcataaatattcagaagtaggcagtcatttacataaagctaaatgcagaaggaattctcttttcagggaatacctggcagattcattaaaaaaattaaagaaaccaagagcataagaatgaaaagcgaattctcggaccccaggctggttttttctggcatgggtgcagtaactttgcctctttgctcagttatcacttttttccaatgacagtaaccataagccctgagagccagcaaatagaacaaaaggtgctgtcacaaacattgtgcaatctcatctctgagatttccatctggaaaatagactggagagagttaaggcttcaaccagccttgcagataaatgcagttagttaccagcccagcaaccctctgcttgcatgagagcccattatgctaacctccttttgaaattgctttgtttctcctccttccctgcactccactccccaagataatttggaaacctgggcaccaaggcttgtcccactctaggggactggggaaacagggattttgccagcacctcctggcagggcaaccatcaggtcaaagggacctgacccatgaccccttcctcagatcattgtgggtgtgattctcctctactacatactcggagtcagtgccttaattggagcagctgtcatcattctactggctcctgtccagtacttcgtggccaccaagctgtctcaggcccagcggagcacactggtgagtgcccaaaggtgtgtgtgttttgtccctcttcccctccttccctcgacagcagcaggtctcctcccacacacccacactgtcattgactttgactttgactttgagtaggccacttcacctgtccaggcctcagcttctttgtctgggaaatggagtcaatgggggaggaggctgcctcccggtgaggacaggaggcgggcatggcagtgacagtattgacactcaggccttcctctcgggtgggagacggagcagaagcctctcccctctgactcggggacccctgcaggagtattccaatgagcggctgaagcagaccaacgagatgctccgcggcatcaagctgctgaagctgtacgcctgggagaacatcttccgcacgcgggtggagacgacccgcaggaaggagatgaccagcctcagggcctttgccatctatacctccatctccagtgagttcaccccacacagccagccctgggtgctgctgcgtacatgcaaggagagggtgtcagagctcgggtaagagggggtgcagggacagaagcaggaggccttgagattatccgactcagtaggggagcctcaaactggctctgatagctaagctcccagaaatcaaagtactcttcattcatttatccaacaaacatgcatggaaagcctgctatgtgctggacactgtgctggccctcaggatacagtgatgaggaagagagatgaagtttcattcctcatggaactgatatgttattgacagacagcagcaagtaagtaaatgaccacagttttgaactctcctaagaatgaagactttttagtaagtcagactgagctgtcattgccctggggaagctacaagaaagcttccatccacttggggctatgcaaaagaaaaagactagttatccttaaatatcagaagcccaggctgaaggtactcacaggtgtagggactgaatttatattaaccaagtagtttgggaaccccaagccaaggaagaagaaaaagaccaaaactggtaaaagtcctagagtcccatatacttgaaaccattttactgagaatgtaaaacttttttttctttttttgagatggagtctcgctctgtcacccaggctggagtgcagtggcaaaatctcggctcactgcaacctccacatcccaggttcaagtgattctcctgcctcagcctcccatgtagctgggactacaggcacacaccaccacacccgactaatttttgtatttttagtagagacagagtttcaccatattggccaggctagtcttgaactcctgacctcgtgatccacccgcctcagcctcccaaagtgctggaattacatgcatgagccactgtgcccagcccaaaagattttttagaaattgaaattttagttatggaaattaattcagtgaacaatggtcccctggtcagagtgagggcttacggaggtcaggtgatccatggagtcctggcccaagtttatctcacagttggtctcgtggctccgtggacccatcccatggtggttacttcccaagtgcataattgggatgtagatatttagcaaccagctgacttcacactagttccctgacctgtccagtctaagagtcattatggccaagtggaagcccctggaaagaagaaaacaaaaaagaaaccaaaacttactcagtgcacaggttacatgaatgagtatagctgaagagagaatttttgaattagaagacagatgagtggggattacacagaacgtggcaaggagagtaagttggtagaaccattttacagatgggaaattaaggccagaggggagtgtgttcctgagatccctcctgaggttagtagcatggctcggactagatcctccaaagtctcttaactcctggtctcaggctattttccacaaagagctgggggcctctgtggggtgaagaagacttaggacaccatggggcaccattatgaggccatttcctcctaggagaaaaaaaatctctgggctctgaaaggagtagaattagggtaggaaattaagagaggctaccgaccacctcctccaactaaaattggttcttttggtgccaggaagagacacacctggtgggggagggaaggtggtaatggagggggtgctggtagtgtctcccagatagacccatccaacaagtctcatggagaatgagacggtcactcaggtcatctgcgtattcttggcattcttgctgcctagagagagagtctgatggagctaggtggccaccaagctgtcccactccccaagacagtttggaaacatgggcaccaaggcatgtccctgtctaggggactggggaaatatcccatagcagtgttctcacagtatggggctggccatgaataccccaggagtccaacctccctttgtccagctagaccatggtgtcctatgcctcaggcagggaatgtggtccagtcatcagtggctgggccgtctgccatacatggtgcaagccatggcgttttatgcagaaagtcctgctagcatttgattttctcagaatggagctgtgagcatggcaggcaaccactgtttcctggattcttcaccaagacaccccaagttcctggtctctccccgttatcctcatccctgaccctgtggttctcagagcctccaaacacactcaggctaagcactccatagacaggggaaatttggaaggaacatctagggagctcagaaaagccaatgtccctagccccaggcccacttcaaccttctctctgtcagtcctgcctgcccctggaggctggttacatgaagagtaaccccctgcttgtgtatagccccccagttttgtacaggtttagagacagttcccagcagtaggaacagctgccgaggtgggagagggcttctcccgatagccgggggacttcctctcccaggaacaacagggtggggtagagcaggcttgtcgttgctgagatagagagagggaagggaaacaacaaggaaagtgggggcactgggtccccaaggttcctggcacagcaagcagtgaagttggggcagcctcaggtcatgtagtgggggcaggtgacatctgctttgactgctcctaagagatatgtactcatctcctggattccaaactgcagcctgggacatgttttcttatataaacagcatcaaaagatgtgtgagttcccaggctagcccactgaaccctacctagtgggtgctcattgtcccccagagcccccagaagacaagccgtggctttgtgatgggcctggggccaggaggacctagggatatgttgtgaagagctgagaagactctggaaaaaaggggctctggagccaagcaggagcccgcccaggactcctcacgtgtccaagtcacctagggagagaaacagagcagcccaggttggtccctggaagagagcagcggaggaggggaaaggggagagcccctggggagagctttgaaagtcaagtgctgtttgctcagtgtgtttgcctttccgaggatgtgtttttttttccctccgttagtcagcagtgggagggggagagagacgggtggtagggtgcagggtacctcctggctgcaggcatatgctttgagtgcgtgttcatttacctcctctggacttcctgccttctgttaccagggatcaagacacaggtcattaggcgtgaggtaatggggcatctcttgttctgacccctggcgccagtcttggagtcctgacgctgcagaggagccccagagtcacatttcctgttggggcccatcctgctcatatgcggcaccatcagacttctgggcaggcaagattacctgtgactctgtctgatggtctcgccatcaatatcactgagagtagctgtgtatggagtcccgaactggtacaggataaaacagggggctgaaaagggaatgaatgggcacagtttctctggcatcaaaagtcacatccagaattgatatttcctgttgagtaaaaatagaaatataagttgctcagtggatgttgagtgagccctattcatgtgccccactctgtgccaagcaccaggaaggagggaagggaaaaatgataagatgttctccccgttctccaggagtttatgctccactaagaagtcagagctaacatgcacagaacagtgtggcagcgagagcagaaccgtgtggccagctccatgcttgccgcctagcaagcgtgattgcacttcatcctcataacaacttggtgaggtgtgttgctctgttgtcccattttacagcagagaggactgactctcagtgaattgaaatgtctcagtgaggtcttccacagcaaaaggcgaagcacagagaaggaagtccatgtgggctgggagttcacccagagattcatgtaggggcaatgtgggctgtaccttgcaagatggtgggatttcaatgaggagaagacaaagtgggaggaagctggagacaaggactgtggtctcttcctttagaagtcagttcaatctttttttccttgtggaagcagcataactctaggtggttcctctgtatctgaggacaagctttgtagaggtgacaaaggggtcctaggtcctatcaggcaagcactcgatatgctgccagttcattctgtccattgtgagatacccattccagagcgcttcctctgtgccaggctctacggaggttctggatgttaaagaggaagcaggcatggccctggccctcccagtcttgtgggagattgatcatgcccatgaatagtgaccatgtggtcagagccacagggtcaattccaaatgcccctgtttctcttttgtgttactcacctgactctgggtctttcgtttcttccattcattttttttaaacaaatatttcctgcccaccttctgtgtgccaggcctggggatgcagtgggagaagcctctgtcctcctcagtggaggcgctaactcagaacaggcagtggagaaaaacaacatgacctggagacctggtgccccttccttccccagcatctttgaaattcttttggttgttgttgttttgagatggagtctcactctgttgtcaggctggagtgcagtggcgcgatctcaactcactgcaacctctgcctcccaggttcaagtaattctccctgcctcagcctcccaagtagctgggattacaggtgctctctaccatgcccagtaatattttttgtatttttagtagagacagggtttcgccatgttggccagcctggtctcaaactcctgacctcaggtgatccacctgccttggcctcccaaaatgctgggattacaagcatgagccactgtgcctggcctgaaattcttcaatatctacctgcccttctgccagttggtgcagccacagtgggctgcttatgcatatcctggcctggcttggtggggagcatggctgagggagagccggggcacccatcaattaaggaggtaaagatcagtctgactgagatgcctcctgccacacttcctcagctgccagcaactgacaccattaacctgatttccttccccctctgttgactgcactgactattggactgaatgggaaacagccccgtgcacctcaaaatgcacttcccctcctgcagatgcatcttgcaattaggcccaaactgtgagcctgcatgctcctcccctggccctgcacaggcaacaaagctgaagttaatcagaggtacaaatggctggctatgcctctctgacacgtaacttctggaacatgtatcaatgctttggaaatgaaaagctcctggtattgcaatgccaggctggtgcccataagggccagaaaacattccttgggcaaagccagggggagtgggtgatctgatcccagctcaggtttgttgatttgttgttttgtttgtttcgttttgtatggggcaagggttgagggtatgaaaaacttacactatcatttactaccgtagtccccagaacccagcacaccagcacaaggcctggaacagggataccttttttgaatgaataagtctttttttttttttttttttttttttttgagacagagtttcactcttgttgcccaggctggagtgcagtggcgcgatctcggctcactgcaacctccgcctcctgggttcaagcgattctcctgcctcagcctctcgagtagctaggattacaggtatgcgccaccacgcctggctaatattttggtatttttagtagagatggggtttcaccatgttggccaggctggtctcaaactcctgacctcaggtgatccacccaccttggcctcccagagtgctgggattacaggcgtgagccactgtgcccagccttgaatggataagtcttaagggatatttttggaaaggatattctaaaaaatacccatgtctctacactattgcagaagggctttcagttttgatggcagcctttcaggccagcctacacgcaactaaacttttccataacagcatcacacttacacaagaagaaggttttataatccacttgccattatttaacatagttcttcctccttaactttcaagatctgagcactataatgttcttctttttgtttttgtttttttctaaatcaaattaaggtgagtcacctcaccttgggcctgagttggacagaaatctattcttggctatattccccacccctccaccaccttggaaccttatagaactttatgtggttcaggaaaatgagggcgaggcctcagatcttcaacccatgacagctgtatgcccagctccctgccttcctgtcttacccccagctagggcacaggactgactattgtgcccagagaggtgccagagcctgtaacaaccccagacttcccaggtccagccacatccaccccagagccccaaaagatgatcttcagagagacctttaaaacacaagtagctggtcacttccatccagaccagaacccaagatggctgtgctcttgctgagacatgttggttgtcattgcctccgagcccactttagccctcagctctgtaccagaaatgctgttcctttgggaatcacagccaaagaagagatggagcagttctggaataagaacacaagttcaaactgtcccatatctccccacatcactatctacagttggtctcttcccatggcgatgtccatctgccaccgtggcactggtattgctttgagtgcaggggtctctctttttggcatgttggccctgttactccctgggaactttgagtcttatttggaatgcgtgaagtccctgtgtccggggccagcactgatccacacagctaagtttgcactcatcttccctctcatgtatcatatctggaatggggtctgacacttgatgtgggacctaggaaaaggcctgaagattccccagctataccaatctggagtggttgtcccggttcttactgtactgtcctctgtagggctggcagccatgtgaagaacagaggttcccagcatcatcttcctacacattattacattcacccatctttctgtttctcacttttatctccagcctgggaaaagttctccttatttgtttaaatccttttgtgcttttagatccccttggagcagtagagtaccttgtagaccataagagtggaaaagggtctagttttctccttgtttctaaagatggggtggctgaaaaaactccccttttttgcctacagcttgcctctctgggcctagaagtggttattctgtctccatattggcctttgatttgtgctgagggtcagcttttggctccttcttcctgagacagtggaaacaatgccagctgtgtggcttctgccctgggggctgggggtgaggctttgggtgccactgcctgtgggttgctggcttaaaggacaattctgttcattggtgagagcccaggccattaacacctacgcagtgttattgaaagaagagaggcgggggtggaggggaattagtctatcccagctagagggagataaagagggctagttagttcttggagcagctgctttgaggagaaaatgtatagcttttgacacaacaggaagatccagaaaattatcattgaacatattaaaggttatttctttttcttgcaaaacacacacacacacacacacacacacacacacacgcgaacacacgcagctgatgattctactctcccagccccagccctgaaggggacccagaactccctgcacaaaggctgtccttcaaggggagggtgaaagaagtggaaaatcacattttcattctttagcgtctccatacaacagccagaactgggcagaagctaattatatcagaagcatactccatgttgctgcatcagctttgggatgttcatttttaaatttatttatagcttgtctcattcctcaaaggagttcagggagctacaaaaataaagacaataaaattgaaaaaaattaaattaaaaaaaccatgaccagggaaaatgtgcagtagaatgaagtgtcaattatcacgttttctgactgcaaaatctcccccacggctgatgcaccatcatttactacaacagcccctcttgttggacatttccagtttatttcgtttgggatggtttgttgctgttgctgtggttgtggttttgttttattgaattttgtgttagctgcagctaataccatcttgctgatggctttgcgctgctcttgaatgattactcaggataaatttcctggagacggattataggatcagaaggtctgaacttctgtgtggctctagctacaaagcaccagattgctttccaagagcgttgtagcaatttataatccaacactcagcctattttttggctgggagtcaagccccagaatgtgaaggaggggtcttggcctggagcaggggctgagggatgggtgcacaggacccctccttattggttatttatggggatgggccaggaggagcagaatagaggcccctgccctcccagttgctccttggagtgactgaccccataggggaggggcgaggctacctcacatttagaactatgtagttggtgatggtcaaggtcctaggtctgatgggcatcctcctccctctcctcctcagccagtaatggctgcactatgtcgtatgtcctagatctgggtcccttttgctgtgggaacaccaataatacttacgctgtttcctgccggaaacggtgcaggagggctgtggcatggtagtgggccctggaaaccatctagccttcatgaggaagggcagttaaagcacaggcatgtatgatgttggtattgattaaaagcctcacgggcagagaaattcgccatctgccagggccccagccatacgagggctccagccatacatcctccaggagactgggacctctccaattgcaggagccttgccttccccatcagattaggaattccccgaggatggggacaatgtccttcccacctgcttgagaactcctaaggggcatgtactctgtctccccattgtatctggaacttcctgggagcatagctcctgtctccgtcctcagactgggaatcccctaagggcagaggccatgtccttccacccacttgggattccctgaagttggggaccacatctctgatgtacaatgctttgtatgtactgactgctgcaggattcttggagtaaatgggcagtcaacttcttggactggtattgaccatctggacttcatcagagtgtccaagactttgccattcattagacaggggccatgtgcacaggcagagccctggcctctggcttctggctcctgactcctggtccctctgctttaatttggctaatggcagaaccagactcctttctgggctgccctggaaggggatccttgaatgaaagaggatagatgggaaggtggcagctgacatggttacctcttatgccatgggggggctgctctctctggaaatttaggcctggggtcagggcactgttgagcattttacaccctaggccagaggaggggtgacctgtggagcagggctaagctagtagcccatgaggtatgatgtgtaggcagcacctggggctcacagagcctgttacccatgttatctcctctgaccttggaaagagctggggtgtatgaacaagtatttataagtttacaaaaatcatatgaggaaactgaggcacggggaaggtaaatgacatgccctaggttacacagcttataagtagcagggattctgcccttctgtcacaccaagtcccactgtcttttcttcctggagtccctgtgactgatctaaaggccacatgtttaacagaataaggaggaggcctctgttgcagcaaaccagctaccccacccgcacacagactctaagggacatcctgctttaagctgtccttagttactaatacctcagtgagaatgagtttgaaattttctcaagagccatgggagactaggaagtctctaagcttcatagagagcctggcttggggggacacaggagccaaaggcagaggaagaagtggcagctttgtgcccccagaaacacgtgctcctgacctcacagttggccacagccagccaactctcccatccttctcccaccactttcccgtggggctaacttcaccctgtccacacggagtgacttaacagtttaagccccagagtcgggggccggggtacctgggacaagagtcctgagggaaatggggtgaggaactggaagtgccacagggctagagttctgcccctagcctactggagctgtgccccacaggctggccccactggactgcgctgcctccaagccatcctgggcatctccatgtgtagctgtcacgctcctcccactaaacgcctccctgtgcttcctctgcagttttcatgaacacggccatccccattgcagctgtcctcatagtaagtggatcctttctccatctcttgggggtagggtggagggggagggcgtctgcagtgacaggctgcccagatttggcctttctgcacaggggcctcagaagacaggctccacagccagactgaaaataggatcgaaagtttatagagggtgtggcccctccccaactccagccgaacaggggcctctgcctccaggcctggaagaccggaggcttagtatttagagaaattaaactttcttttaaaaaatagctatccaaatttttaatttttaaagtgaaacatgtgtattgtagaagtgatgggaaatccagaacagaaagctcaaagagaattaaaatcacccataatcccactggtaacatttttaatgtgtttctttccagtctttttttaaggcctatgatatgtcattttctacaaaaataggaatgtgctatgcatgcagttttgcaacctgctcttttaaatttaggaatatgccacacacaattctccatgccactgaatattatgatggtggctttctaaagcaattttgataaaagctgtgtgtgagctgagccatgggggtcaagcagcatgctcctacagaaaggcctgggcccctacgagcctgcagccccctcacccagcctcccatccccatcttctgtgatggctgcagttccttaaaaagatctgcttatttcccccggggccagtgtccctgagctgtgtagagttcacagcctgtcggatacacttgggaattcacttccaatgtgatgtattgagctggttcctggcctggctcctgggggaactgtgggtaacagaggccactgagccagccaggtggctggggcaaagcactgtgcagtttcgtaatcactctgtttacgttatcccgatgaggactggggagatgagcaccccgcctgctgtctgcagagggggccgtgctgacctaacccgagatctcctccctgcttattcccagccaagactgggcaggacagggagtcttggccaggacagggagggagcagcccctgctctccagcttgaagtcctgaacttgttggggacgtttccatgagatgactgtggggatgatgaaggtgtctccaactaaaagatcctcttaggagcctgctccctgacagccctctcatttcccttccagtgctgagcgtttccagtgtgggagggacccacaccctgggccaccctggcctcacttgtgcctctgtccacagactttcgtgggccacgtcagcttcttcaaagaggccgacttctcgccctccgtggcctttgcctccctctccctcttccatatcttggtcacaccgctgttcctgctgtccagtgtggtccgatctaccgtcaaagctctagtgaggtgaggggagggtccgggcgagggcactgggcaggcaggtcctgtgtcagcctcaaggcttgctcgagtgatggccaaaccacagctgtttggtcccggaacacacccccattgctgggccttgctgtagctggtcctggttggtcagagggacattggcctgtatggtttcccagctcgccatccctgagcaaggacttgcttacatacctcccaggagaggggactcactgtcactttcacgacaacttaaaaaaaaaaaaaaaccagtgttgagccaaatgtggaatcctcctaaattctacccactggtcctaacttcaccctccagagccaccaagaatgaggccatcccgtccccacgtggctgccccatggatatcagaaggcatccactgtgtctatctttcccaggccaagtatcccctaccctttccacagcccctgagccctcacagcctcagccagtgaaacagcttcccccaagcgctgggtcctgctctgattggcccacagctcttggaggctcccacttccaggctctagagcctcatggggactctgccactgtcccagaggcattgccctcttgggaatgaaagcctgaaggtagaaggctgaggctttggctgggaaatgccctgtctggagtgagaagatgtccttgggcctctgaagtagctctgcctccttgaaagcaagagcctgtcatgcctctatggagggctggcttgtccttacccatggccagagaaccagtcagtaacaaatgtcctctgtgtcttcagccttgaggaaggtgacacccctgtctcatgggaccctggcaggtactgggaagctggaaggaaggagtagctgttggaatgaagtagctgatagagagggtagcttgcagggggagactctagcatgggttcaaagatggaatggggcataactcagcaaaattatgctctaaggagtatctgaccaggcagtagctggttaaacagggattagctcccatttccacagtcggctgtgctgactcagtttcttgaccagggtgttgtggggtctgaagatcacccctcctcccaccacccactctccagccctatgattctgtgtagaaaccacagatttaagaacgctgcacctgcctgaaaactgttgcactgatcccaaagcgttcatattttcaaacactctggatcccactgtttccaggaatggaacaccagagtagcagaggccttttcagtgaggcagctcaggctctggctgaaggtgggcgcaggacactacctgaagcttcaccccaagagatgagggccagctccactcttcccagtcaccgcctgtgggggagggaggctggacagggcatgaaggcagagcctggtggtctgcccctcccatctaggggtggcgcacagaaagggagactccaggccacagctcacttacaccccagaataaccttgccttgagggtgggatggcttgtctgccccaggcctgttggacatttagcaaaagagaagaaaggggaatacaaacaatcctgagcttcccagaaagctttcacacctccaggatgggagagaatgaactagaagagtgaagcttccagtgcttcctcaggtccacagggaaatctggacaggggagagggtaggaatagccgcctcccccgtgagtaatgacacctcctccagcaggctgttatggggatccgattacataatgctacaaaacagttaacacagtgtctggcatttagtgtatgctcacaaaatactagctattgattctttaccaatcctagtcctaactaaccttaaccctgaccaatccaacaccaaccatccttcagtctaataacccagactaactaacttcaacattaaccctaaaactaaccaatctcacctccaatccagaccccagcctattccagctgactggtcaaccctagcaaaccctggtaacaccaattacctgcccccatgcccactggtctgcccccttcagtgtgggctttgtgggactatacttcaggcctgagatcctgctcagagctctctatcaggctgcgccctctcccctcccctctgcccctggcaggggtgaggggtgtctctgtgcttcccgagcagcgtgcaaaagctaagcgagttcctgtccagtgcagagatccgtgaggagcagtgtgccccccatgagcccacacctcagggcccagccagcaagtaccaggcggtggtgagtgcccggcctccccttgctactcccagcatggtcctctaaggcccaaaacttgggcctgctgtgtcggacttctgccttttttcccaggaagaggggctcccttccctacacagctcccagcccagtgggtcctcacctccaaaccacccccagcccctcagggttgtgaaccgcaagcgtccagcccgggaggattgtcggggcctcaccggcccactgcagagcctggtccccagtgcagatggcgatgctgacaactgctgtgtccaggtgagtcctgctgccccatgcctggccacccagcaccaactcccagagggagctcagcacctggaaagccagaaagctgcatgcttagtcctctgcagaggtcaccctgcctgcctgtacggtccataggagtccagaaaccagggaccaccaagtggggggacccccagccttaggcaagggtcagcatgagaaggccagtctcccactcccctgctctggaagtgatccaggggctggaatcagtgtcttttggctttcatggaggaggggaagccagagactattcactgggaactggctgcctttctgttctctcctgggcggtgggacacgcctaatgaagatcatgggaggctacttcacgtggaccccagatggaatccccacactgtccaacatcaccattcgtatcccccgaggtatggcccagtccacccctccagcatgcccctccccatgtcccactgaataacatagagataaaaagacaaagctgcatttattgagcacctactctctgctcattcttggtgtatgccctgggtatattatagaaggggaaggctacattctagaggcttccgtgtgctgggtgggagtgaagcactaaggacagggtaaaattgccagccttaatgtcaaaccatccattgcagacagtataggtaatgcacaaaaagatcagaagtgggtagccaaggaacgcaagtggaagtgatggggtttctgagaatggacaaaggccctgaggccatgaggcaggaggattttctggcagaggcagccatgagcaaagtatggaggtgggttggaggtgggacccaggatggtgtttcttgggaccacaaggagcctgggctcatactaggagcatgggaaaggagaagcgagtgcttaggaagggtggcggggcaggaaatcagagagggggaaggacctggggagccagaggaggatgttgatttccagaaggaaaggattaaagagggagaggacttgctggggattctaggtaggaagaaagaaaacaggggccccagggttgggtgcatctgtctgtctgtctttctgggtaatggttgttcagactcccccggccccactcacatctgccaccctccctccctgcaggccagctgactatgatcgtggggcaggtgggctgcggcaagtcctcgctccttctagccgcactgggggagatgcagaaggtctcaggggctgtcttctggagcaggtaatacatgtatcctcagggcccagtggaggggaaatctccttttaaccatcctcctcagttgaggatgcacacacatttattggagggcccactctgtgttcagtgaggactcaataaatgctgctaatggatattctcatcatcatcactagtacgtattcacctcttactatgcgcaggttctttgctaagtcctttgcatgcattatttcatttaatttttatgataactaacaaggtccatactgttctcaattctcatttatagaggaaggttaaactatttgtcctaattcacacagctaataagtggcagagctggaattgaaactcagttctgtcagactctgaatcccatggttactcagatgcacggcagtaatttcccagtgtgggaaattgcaacaccaacattggtttccagcttggtcctgagctgcactgacctacacaccataagtgggtgttctgaagatccagatgtaaccaataaatgttggtttctgggcaaagatcactgtcttaattaaagagccagaaccccaggctcagtcaatcacgaatctgttatttatacccacctacttccaagaagcacttgaaactagttgatgaaagattcatgtaaaaatcaaaaccacaatgagataccatctcacacccgttagaatggtgatcgttaaaaagtcaggaaacaacaaatgctggagaggatgtggagaaataggaacgcttttacactgttggtgggagtgtaaattagttcaaccattgtggaagacagtgcggtgattcctcaaggatctagaaccagaaataccatttgacccagcaattccattactgggtatatacccaaaggattataaatcattctactataaagacacatgcagacgtatgtttattgcagcactattcacaatagcaaagacttggaaacaacccaaatgcccatcaatgatagactggataaagaaaatgtggcacatatacaccatggaatactatgcagacataaaaaaggttgagttcgtgtcctttgcagggacatggatgaagctggaaactatcattctcagcaaactcacacaggaacagaaaagcaaataccacatgttctcactcataagtgggagttgaacaatgagaacacatggacacagggaggggaacatcacacactggggcctgtctgggggtggggggcaaggggagggatagcattaggagaaatacttaatgtagatgaagggttgatgggtgcagcaaaccaccatggcatgtgtatacctatgtaacaaacctgcacgttctgcacgtatatcccagaacttgaagtataataaaaaaagatgcatgtaaaataaaaccctttaaaaaggtaagaaaataggaactgagaaatgaagagggtaaaaagatgttcagcaacctgggcagaggacaactacagccatcaacataaaacctggctctgtgccctctggtagccaagggaaaaagggatctctgggctttggagtattcatttaggaataaaagttgcagccaatcagcagaagggcaagctttccctaccaatcatttctaggggaaaattattgaaggtgtcaggtttttcataagcatgagtacagaactgagcagggagaaagactttgggcccaatgtctgaatatcaacatgcacccccgtttcctgcatttccaagatgtccctgaatggtgtatccaaaagatggcaaatttccctcctcagtggggtcgtgggctagcagatgagccccttgggtttcccatcacctcccatcagggactgtgatgtctttgggggcagaggggtctttgcctccattcgccattttatttgggagatttttcaacatagcctgactgggaaggcccaggtattcggtttgagatcatattgccttattccgactgcctctccagcctttggagggaggagcccttttctgctgtccaactgcatgcctgcagcaagaagacaagagtccccagtgcactgtgagctgaagaaagtaaccaatatttattgggtacctcctatgggccatgccctttgctaagtgcattgtcaacatgatctcatcaagcctcctactaagtttaggaggggagtgttgttaccccatttcacagaagcagaaactcaggctcagagaagttgggtgacttactagtcagtgtgtggagcagagactctgcccatgttctttccctcaaacctggtcactgctggggcccccagggcctagtcctaagggttattgtccaagccccatgtagtggtcaggctggatctgggctctcctccaaggcagggcttttccagaaggattgcagggctcagacactggagctgcccctgccttgacctgctcagcatggatgtcaaaacccactctgaacctggtccctttgccctgctttcttctcctcccccaccctcatgccctcatgtggcatcgtgcctgcctcaggagctctccttgtcctatgtagatgaagcaggcatgattggcaggggtctgctctgccctgcctcagtccccacctcttctccaagctgtgccaaccctccgggtctgactgctgcccctctctcttaggaaacctctgccccagcccagggaacacaaggagcctctccaaggcagaggaccctaagcacttcttttttttattattttttattttattttaggttctgagatacatgtgcagagtgtgcaggtttgttacatagctatacatgtgccatggtgctttgctgcacctatcaacctgtcatctttttaagccccacatgtattaggtatttgtcctaatgctctccctcctcttgcctcccaccccccgacaggctcggtatgtgatgttcccctccctgtgtccacgtgttctcattgttcaactcccacttatagtgagcacatgtggtggttggttttctgttcctgcctaagcacttattataggccaggcactgtgcaggcacctcatcatctcagtcagtctgcaccgaactctgtgcagtagatattattatatcctcatttatcagattaggaaactgaggtgaagcaagttgtccaaggccacccagctgttaaatggcagaagtgggatttgcacctaggtgctcaagtgcattggtttgccaccatgtgctcaaagagaaggggcacaagagcctcatgaagaaggcatagctagcctgacagtccaaaggccagcagccgctgtggccatgactcacacacacctgcctcctcccagaactgccacgtgggtcctcacagctctgtccttatcaacacttactctcctttacaggtagcctaggccccagctcccagctctgttcgaggctcgcagaggggcggtagtgaaggggtctcatttctccaggatcctctttgctctctcgcccggtcctggtccagcttccctttcaagcatagtgaagtgcatttgttagcttgcagccaaccctgggaaatcatgagaatttgttcccaagtcaactcattctccagcgtccacagtgacgtattcactcacccagttgagcgcctagtgtatactagaccctgtgacagcaacaggagtgcaaaggtgactaagacgtggcccctgctttttttttttttttttttttttgagacggagtctcgccctgttgcccaggctggagtgcagtggtgcgatctcagctcctcacaagctctgcctcctaggttcaagcgattctcctgcttcagcctcccaagtagctgggactacaggtgtacaccaccatgccggctaattttttgtatttttagtagagacggggtttcactatgttggccagggtaatctcgaactcctgacctcatgatccgcccgcctcagcctcccaaagtgctgggattacaggcatgagccaccacccctggccggccccgcttttaagagaggggagagaagacctgggccttagaagagctcagaggaaccacaattgactctgcagtcaaggagaggaggctcactgcggatgtggtatttgagccttgaaggatgagtgtggtttcatcaagtagaaaaggcagggatgggaaagggaggtggtccaggcaggggtgatggtgtgggcaaagccttgctgatattaaagaacatagttctgtgcacctggaacactggatgcatggggtgcattatgaaagatgggactgaagaagtgaacttggcttagatcccatgtagtaggtctgagaagtaagatttaacccaaaggttgcaaaagaaccatgcttgtgataaaggatgatggattggggaaacagagaaaaagacagacagactgtaggaagggaggtattagcaaataatcataacacagtgtgaggtgtgcattaatattcactcattccaagtattgatcaagaagagaggtaggtactgggttaggaaacagcttgggcaaatgcatggggaaatgagagatgtcaagatgcattctaatggcagcctcttgaagatcttaagttgtttttggttcactcatttcgcaaatgaattcatttagcaaaagcactatggatacagtgcttacctctaggaagtaagttttagcccaaatgctgcagaaggatcatgcttatgacaaaggatgatggactggggagagagaaaaagaaaagacagacagactccaggaaggaaggtcagtctgcagctccttatagtggctaggagaaggagtctaggcagatacgactcaattagcttcatctgctgtttgtctctcaaaatctagacatgtgcactgctctggctggcccacctatcctgggcattgagttaagtgtgggggctgtgtgttgagagtccccctccattactggcaggaactccacacctcagacattgagccccaggtctgcagggagaagacgtgcttgcaaagtgagctaaaagcaaaacagcctctgacctggcaagcattcccaagtctgcacgcctgcagccagaggagagggtgatgccaggctgctgctcagatgcttttcagccatacccaggccaagacctggtgaccaggcagccagaaggagttccaggaggcacaaggcaggaagttgggggattaggaggtgtagaatggagaatgctctggggagatgggtgctttgttggtgcaactattcgtttattcctccagtgaccacgtgagcagtatggctgcacacacaggctctgcagccaagctgcctgggttcacatttggtctctgtgctttggaaaatttcataagctttctctaccagtttcccttattacccatgagattgatgtgaggattaacctagcatgtagtaaatatcctataaatattattattcaatagtgtacttctttgccaggaacaaaattcacctgttcctctttaaatgtcctccagtctgtctcctgggaaagattcttgtgagctccctggggacagggaccatattttgtttgtctcactgtatccgtagtgctttttgctaaacgaattcacttgctaaatgaatgaaccaggaacaacttaagaccttcaagaggctgccattataatgcatcttgacatctctctcctttccacatgcctttgtccgagctgtttcctaacccagtatttcactacccctcttctccatcaatatttggaatgagcaaataccgttagtgcatacctcacatggtattataattatttgctaatgcgtctgtctcctccatgactctgagctccttgagggattattccatgttgtaccccaggtgccccatgcagatgtgtattttgtgcactgttctgtgtaggctacaaaggaaaaggcctagcacctgcccttggggagctcacccacccaggatggacagaggtgtgcagacagagctgcagggtgggcacaaagggtccatctgctgaagtcctgcagatgcagccccgagcttgtccctcacgtcagcagcctggctcctggtctcagagagaactgtgtggttcccaagcattcactttaggaagaatcacttgcccctccctggctctctgcttcaaggaactgtgacaaccttgggatttgcaaactctctctttaatccttaagaggaaaatgttttggtaaaaagtcaagattagcagatacactcgggtgaaattctttccctggaaataaagaatagagccattaatatccacagtagagtgactttaaatgcccccggggggtcagcaggaaccagggccctgaggaaaggatcagcgtggggaagaggctcccacttccctgtgaggagctgcacatgcagtctcactggagctccctgctgcaatgctgttgcctgtggtggttggtgtggatgctgcctgccaagagccctgattccccaggaagagagaaaaaggcttctctcaggacggccctggtcgcatctgcctgtacaattcctggagcctttggggagctgaagtcaggggctcaagtgcccctgggtttcctggaggaggcaggtgtggtgagacagctgacagacaggagaagggatgctctgaggaagtgactgtccagccatgggaaccagatggcccctggctgtagtcctgatgctgccacttgctagctctgtgaccttgagcaggttacttcacctctctgagacagactcactgtctggacaatgagtaaaaccctacctttcctgtctcagagatttggcaatgggacccaatgacatcaattggaaaggatgctgtgggtgaaaggtaacctttcaggacagcgacaagcctgtctgggcaggatgaatgggctgtggagccctgtatatcctagctcactctttgaacctcagtttccacttcttccctttttatttattgccggggtcttaaatgagtgttgggggtatctgattctccctctgcctgtacttttggggccaagcactgagctgaaaagacaattcctcctagttctccaagcctacaacctgccccctaaccagctgtgagctgtaatacattctccagtgtcactgtgaggtttgtgccttcacccccattttatagatcaggaaacagaggctcctccaagtaaaggagcttgcctcagatttcacagccaatgagtggaaaagcctctgggattcaaatgtcagagcccatatttttcctacttctcgcacctgttatcatatgctgcctcttcctttaacctgcagttccctcccttcacctccaccgtctcaatccttcccactctttaaggttcagttcagctatgacttcttctatgaggctctactcattttctcagatttcttcctcctccaaatttcttgtaaaaattatgttttttctctgattctaaaagaatgcacattacattagaaaagatacacaagcatacagaagataaaaaccacctaatatcccatcacccagaagcttccagtttttctttatgcatttgcatatgcatttgtgtttacttttccccaaaagttctccgatactttgtcctacttttcttttgacccttataacttcctgacttcggtacctttctgatttgccctaccagagtgtgagcccctggaaggcagcctctgcaccctgattcaggttgccacacatatgccagctcctagtgggctggagggaaggacatgcggttggggaactggaagactcatgctttcagctgtgtgcttcctccctagagtgcaggcagaggaggaatcgaatcccctcagcactcttgtaaagaccacagcaatgagtgagagatggtgcctgccagacataccattctttacttttcagcttaaaacagatacaaagtttggggaggctcactggaggaggcttggggctacactggaaagagaagaacttggattcacaccccagcttcccctcttcccagctctgtcacatttgcaaactctgagtctcagtatcctcatgtgtaaaatggggatagggtttatagggttgtaaggatgagatgatgagttgtttgcaaacaacttctcacagtgcacagtgaaggtcagcaatgagagccagccccgccctttcttctttccaaatgattaatatatctgttaccagcctccattcattatatagctctgtcatgtgctaagcaccatgggggctgaaaaagatgttcttcctgccttaaaattccactggggatgaacaaattacacgggagctgatcagagaggaaggcagtccattatgagggctaattgagcagtgcagaccatgttgcaaactgagttagggcctggagagcttactgtgtgctggggtcctcaggaatgccacagatgcatcaataaccacctctgctactctggaagtagtcacatcaggaagactccagagataagcttatctgggctgtggccacagagctggaatttgtaagctttaggtttctatgtctcatgttaccagcttgtctataaattgtaaattacagccatctgatggttagggaatatgaagtttggttaagagaatgaaatgagaccacgaagattagagaacaggaaaagaggggactggggactacatacccatcagaatcttcattcagtcctgaccctcagcaggagggggatttcatcaggctcatttccatccttgatttcgtccatcctggttctcctgacaaggggcatttatcagagttatggcatgggaaatcacaggggagtaatgtaccatggcatttaagagtatgaacgttggagtcggagctattttctccgctacttactagctgtgtgactttgggcaagttacttagcctttctctgagcctcactttctttatctgtaaagtgagggcgatcagaataaacctccttcatatggttattttgagctttataaagagacaatactggctgagcacggtggctcactgccagtaatcccagcactttaggaggccaaagctggaggatcgcttgagcccaggagttggagaccagcctgggcaacatagggaatgagactcctgtctctacaaaaaatatacaaaaattagtcaggcatggtggtacgtgcctgtaatcccatctactcaggaggctaaggcaggaggatcgcttgagcccaggaggtggaggttgcagtgagccaagatcacgccattgtactccagcctgggcaacaggagtgaaaccctgtctgagagagagagagagagagaaaatactactatggtgcttataaaagttcaataaattttagctgttgttagtattattaaagtaagatctgtatgaaaataaagcagattttttcccccaaatgttcatgtcagaagtatatatttcattggcaaggggctgcttctggaaggttgagaggtatcctgggggaggggatagagcactggcaaaattggcatcacaattcaagtcacctcactcagtgttttttaagttatcaaaatccacagtatgaaaagcatttgacattacagtccactatatttatgcatttataaacaagagaaaaaatcacgaaaaatacagtaccacgtgcagtacacactgattccatctattctttttttttctttttcctcaaatgcacttgccgcctacttattccagacccaatgattgggtccctatccacagtttggaaaacactataagaaatgattgtgtcctctcactttccctctctgggatttagttttccaactataaaatgctcctgatgcccagccagcctcaccgctgctccgagtcaatgccaggaacgctgatttagcacatgctatttggagggtacccatccaggtgctgtgggagggacagagattgagaagagtgctttctgaccccacagaggccatttggaaaccctgggaatgggtgggagggttggaggtggggattgcttctcccctaagactcagcgtgatggaaaggcaatggggtgggaactaactggtgttggtctgtcccatttgtgtcccagcagccttcctgacagcgagataggagaggaccccaggtacagccttgggactgggtcagaagtgggtctcaacaaagggaaggggtagggtgggggtggaggacttgtgggtgggtaatgctgagtatggattcagggatgtgcagcctacatattttcagagacatggggctaaggcctgcattctcaatgagggcaaaatttggttcttggggacagaaaacacttagacattgcaatgctttgtggctgtccaaagtaccaaacagatgccagtatatctgtggtgctgaaatttcatggtgaatggagtcagaaaatagactagcgattgccagggtctggtgggagagagagggaagggactgccaatgtgtatgggatttgttttggggaagataaaaatgttttggaattagatagtggagatagttgcacaacctggtgaacgtacttttagtttcagaggttttctaaacctctgatttttttttaagtgacaggaaagacagaaaaaagtatatctaaaaaggctctaggggtgatcatggaaaagaaagttaagaaatatgactgtaaggaaaggagatgggtgtccctcaggccaggcagaaaattcagtcttgttgctttatgttcatgtgcaaatctaaaaaatccaagtgatatagattaatgaggctctgagtccctcaaaaccttccctccccttacctctccaaaaaacacttgagataccctagaggtggtatgaagtcaggatgggaaggttggctcagctttgcaaataagtttaagcctctggcctttgctctccaacaccaaagaggcttcactttggtatattttctctgccctttctccctccttgtccccaactgtcagtatgtgatgacaggctcagcctctgtaatggtagtgatcatatttcttgagccaaaaatcagacctcatggcatgtgacaagtttgcatatgtggatgagaacagagtggcagaatatttgacacgggagcagcttgggcagtccagggcacatggcactgcacctgacatccctggcagatcccccacattccgtggttgtcttctgatggggccatatggggctgcagatcatgcctggagccctcgcagctccagggctgcgggttcccagccccagagtgcaggtgctggtgtcagcctgcctggcctggcctggctctgtccagagcactccttgccccagctgtttgtgcagctgtatcagcctcagacctcagcctattcattccaacctgaatgcagaggctgggtctggaggagccacattgcgggcttcatactcctgatctgacaagttttccccccagagcctgcaccaatggcacctctccccattctccctcttaactgggtcctccagggccctcctcacacacccacgtggtcaggcagcagaggcttccccaagatgggcacaccccactctccacacctctctatgcagcatttgtggctacagactgggtccaggggattgtaaaggcatgctcatgttgggttggagggagctcaggatcttcctggaggatatggttcactcccatgagagctcagtatgcctttcctcccctgctgcagcccagagcgggagacagcgaccgacttggatatcaggtactgcgtcctgggaacattgccccccagggtcaactccctccagggtgctctcaggcccaagggagccacatcaccctgctgggcagcccccagaccccagccccagtgttgggggaggccagggagggcccctgtgctccaccaggtggctcgggagctgctgctgtttctgtgcatccatttactcccttcacataagatcatttttatctgggatctctttttcttttttcttcaaaaaccacatcactcaaaatgtggcttccttggctctgcttttaaaaaaaaaaaaaaaagttcttccatttggagaattacctgctgacttcaaagtccagtggcttgagggctacccaaagagggaggaagccagaagttgagtgttcccttggtttggtcacacttttgggctcctccctgactaaggaacaacagactgcagggctggggcaggctgggtgtagggcagggaggggatgaggtcctgctgccccagtcagttgagacccagacctctcaaacctgcctgggggaaggcaaggccaccagaggccacactaagcagatttctaccaactgcacctccccatccccttgcctccatctgagccatcagcttgacaactgcctctgagaacaagcccctgagaatgccttccgcaccccctactcccgccctgctttttccaggaagagaggccccgtggcctatgcttcgcagaaaccatggctgctaaatgccactgtggaggagaacatcatctttgagagtcccttcaacaaacaacggtaaaagcctgtcggagggaggcaggatgtggaggggaggaactgtctctggccagcctgccccagttccgggcccctccatcgatcacccacacccagccatctcactccccaggtgcttacctgcactccagcctctccatatggtgcacctggagaggggccaggtgtgcctgagcattggggcaatccagctcccataggggagagggcaggaatggagggaagggagagagccccgctgccttttctctagctggtgggagggctagctagctctctctgtgagtctccattcgcctggctcctgcactattttccctccaatgataatagttagggctagcatcgactgcgctcttactacataccaggcacagtgccgagctctttgtacacggaatttcctctcatgcttacaacaacctcagtaggtagatattattgttattcccactctacagatgaagaaccaagtttcagaaaggtcccaaggccacccagccagtaagtgaccaagatgggtctcaaatccaaagctgcctaacacctaagtacatgtttgtcaccaacatactctgatgcctccatgaactctggctggcacctgcccaggctaagggctggctggggaagtatgagaggaacaggctgggcaaatatttgaccagccatcatcattactgcctaaaccaaccagcagtggttttccctgcagtgccccaagcacgggttccggctgcagcttttcccactgcacagagatcatgagcgccctttcatcacttactctgcatatttgttcccaaccaattccatccttctagtatttaacctgcccaaacgctgtgtgaagtgctgacctcagctcttttcaagctcacacggtgtttgcttgcacccaagcgggaggcctattaaagccattgctcaccctgggcatagctacccagagactaatgaccctctgcaagtgctcgggccaactctgaccaggctgaccagctgcatcccctgcctctacccacgccaggtacaagatggtcattgaagcctgctctctgcagccagacatcgacatcctgccccatggagaccagacccagattggggaacgggttagtagcagcctctgaggggttttttcaaagccaggacccccaacctaccatgccctgagacactactcaggacaatgggtaactaggaaataggagacattgaaggctgaagagttgcctgcagtaaggtcaaacatgttgttcttgatgatgtcctttgacaggttttcagtcctgcttggagggcaaggtcagcttagtgccctcccaggctggggatcttcttcatttgcaccccaggtatacactgagagcccacacagcactgtgctcagcctggggttgtattgttcctgttcatcctccagatggggtcccctccacaagcttagacgaacaggattctcctgtgactgtcctccttttgtgtgattttaatccctgctgcctctgtctttgtttgtactggtcagatggtccctagcgcctacacaatgaatctttaaagacttggggctcatgctgccctcttctgaatgaattcagtaaacacgtgcaagttccttctctatgcaaggtgagaagcaggcaaagaagtggatagagccaggcctccatcccaaagagctcatagtccagtagggtacaggacagtgtctcctgaatggctgagggcatgatgtgttcctcctctttggtgacagggcatcaacctgtctggtggtcaacgccagcgaatcagtgtggcccgagccctctaccagcacgccaacgttgtcttcttggtgagtgcaagttcccttggggtcctggtctctggctgcctcccaggcctaactgcccacctccacctccccgcaaccccaccatcatccaacaatctccctctccaggagtaaatccctcctgccagagatattgccttatcatcctagtgatagggaaactgaggcaggcaaggatagcacaaatgacccattgcagacttcagatggagctctgcagtagccaatgaggagaggcaagctgtagttataggctgcctgtctgtgggacagcccaacccctcaacacttatgcagcccgactataagaatggctgataacagaatgtgtgctgccacttcccatcttatgcccagtgcagacattgctaattgttcacagcattatttcccatggaacttaactcatcctcagaatccttctcaacacagcactccaggtaaccactagccatcaaacatgagataaaactaggccaggcgcggtggctcacgcctgttattccagcactttgggaggccgaggcaggcggatcacgaggtcgggagatcgagaccatcctggccaacacggtgaaaccccgtctctactaaaaatacaaaaaattagctgggtgcggtggcgggcgcctgtagtcccagctactccggaggctgaggcaggagaatggcgtgaacccgggaggcggagcttgcagcgagccgagatcgcaccactgcactccagcctggggacaaaccgagactttgtctcaaaaaaaaaaaaaaaaaaaagaacgtattcgcaatccttacactacttcatgtcaagttctgttgtgtcaggtgccttgactgacactgaagaattctaagaaccagtccttggcctcaaagatttagaatctgattagggagacagagctcacccagttcaagaggcccagcccggttcaaatccaaactgtgcggcataaactatgagggggccttgtccagggagacaactgtgagggctggagtaatcagggagggcttcctggaggagagcctcaaagggagagtcaattaaacagaaggaaagagggaggccatttgcacagtgagttggaagaaggaagctcaagtctctgattccagctttattccctcccctctccctacaccacacgcacaagcactcctttactaaagacacttcacagtgggaagattcagtctccgttaccgtctgacacacacacagcgttttacaaagcatgggtgcattcgcgatctctcatgagatttaaacaaccctgctagagaaaagtgaagtggacattttatttcagtaaacgtttatgaagcgtctactctgtgccaggcactaaacgtttatgaagcgtctactctgtgccaggcacaggcacaagaagtctcagttcttgggagtgccataatcaggaatggacaaacaatgatcagatctggctttgcgccagtgtcacgggaatagggaggaaggaagggtaggcgtgggggtcaggacaggatgcaggaggaactggtgcttaggtgagcgaaggatgggtgggagttcacaaggcagacaaaaggcagagcagcactccaggcagaggaacagctcaggagaaggcccagacggcaggcttcctgggaacctggaatgcagagtgctgggaaagcacagatgaagcatgagtctagaagggaaagcgagaggttataaagcacctggaacaccagcccacagggtttgactttagagatgatggggagccgttgaaggtccaggagtcaggcagtgaagtgattagatctgtttgagagtgatatctgacaactgccccattttaaatgaggtaaccaaggcccagagaggttgggtgagttgtccaaagccacacagctaactagcttcagtccctagagcagagttgatagaactctaatgggttttatactcattgtcacccctccccaccatgcctttccctaccctctactctcttcctctcccttctgcccaggatgaccccttctcagctctggatatccatctgagtgaccacttaatgcaggccggcatccttgagctgctccgggacgacaagaggacagtggtcttagtgacccacaagctacagtacctgccccatgcagactgggtgagggggaacaagggggtcaggctatagggggcagggctggggaggctgtcaggcatcttggcaggaaccaatccgttgtcttggtagcaactgctgagggccacaaagcataagagaccagcactggatggctttatgcatgctgggcatttcagggagaccctgtacaggccaggggtttggtatcacctagacccacagacactccccatcctggcccgggccccccatggtacactcaaggctggcaccaagaagtctcaggaataatcaagtgctcacttctcaccttctgattcctgcccttttgatgacccatccccgcagtcatggggagtgcccatttggatggaaaagccctcttcccaccctatgaccttcccggggtggatggatgcaccaccccgggaatcatatgggaaatatggaaccaaacaatagcagtagtaatagaaacttcaggctgggcgcaggggctcacacctgtaatcccagcactttgggaggccaggacaagaggatcacttgagcccagaagtttaaggctgctgtgaaccatgatcatgccactgcactccactacagcctgggcgacagagccttgtctctgaaaatttgaaaaaggaaagaaagaaagaaagaaacttcaatattatcagtagagtccaatgttgtgaaacccctcattaactaaatttccatactcttcagtaggtagaaaataattactttttgattcattagaaagcacttaatttttaagatggagatcatgtaattttgaactctaggtcttgcctactcctatataaattctcctctaaacaacagccaaaattgaggccctctttgagcttcaggctggtgccaaatggctctgcttattttccccaaaataaatcttccttccatgtatgatgagaccccctccagtataaagaagacccaaagaaaatcacccaaagaaaaaaggcccaaagataagacccaaagacctaaagatttaaatatatatacagatacagaaggtttgtttctgagtttctgtagtgaccttggcaataccttgtagttcaggacaatcctgaggaacacagaagtgctggcttccttgaggaatcagtgatcaggactctcgagccccttgaaccccagcatagggcgggagggggtgagggcagcaggggtgggtgtctgaattaatgtcaggtctacgtgatggtgtcatcaagtgttccagataaaaagttttattgagccgggcgcggtggctaatgcctgtaatcccagcaccttgggaggccaaggcgggtggattgcttgagcccaggagttcgagaccagcttggggcaacatggtgaaaccctatctctataaaaaaaaaaaaaaaaattagccaggtatggtggcgtgcacctgtggtcccagctactcaggaggctgaggcaggaggatggcttgagccaggaagcagagattgcagtgagctgagatggtgccattgcaccccagcctaggcaacagagtgagaccctgtctcaaaaaaaaaaaaaaaaaaagatttattgattccaaagaggcatggccacacacacttagaccagcaggtgctttgctaagccctgatggaggctgccagacccgccgtcaagaggagctaagggtagtgtacaatgagcccacttagtgtatgacggccgctgccgtgggtggagtccttgtgagtaaccagccagcttgagcaggatgcactaatttgctctgcaaacccagccattgagaaatacgcctcagatgtaccgaactctaggtcctaggagtatgttggttggggtaggttatcaataccagcccacttgcagtggatgagctggtggccatttgtagtgaggaaagggatgtgtcaacctccatcttagactccacaattgagggatgtgaccaccattcctccccagccagcccccaaaccacgtttgttgctgcctttccagatcattgccatgaaggatggcaccatccagagggagggtaccctcaaggacttccagaggtctgaatgccagctctttgagcactggaagaccctcatgaaccgacaggaccaagagctggagaaggtgggtatatccagggatggccaagcagccacccctggatgcaaaggttctgctagaacctgaactcataaaggtcttcctgtccttagtgccccaggaagccccctaaagggcagatgtgggagctgggcatgaactggctcctaccagaggagagacagtacctgtgccaggtgcccagggcagaatcaggtgggcaccttcgccttatcctgaggtagtcagatactatttagttgcaaagtttcagaaaatcaactcaaactggcaaagaaaactaagcaaagaaaacaagagggaattaaggatttattgacccatgaaaccaaaaagtccaggtgtgtcatagctttaagtgtgctggatccaggtagtcagtgtaatcagaaatctgtttctcccatctcttgactctgctcccctcaaattggctcagctcccctcaaattggctccattctcatggtatcagtgagggccaccagcagtcttaggtttacattctcccagctcaacaactctgccagaaaaaaagtgcctctttccccatagttcagcaaaagtcccagggctgagtctcactggtccagtttggtcatgtgcccacccctgaacaaatcactgtggccagcggtgtggaatgtgaggattggcctgtcctgggtcacgtgccactttgggagccagatccacctgaatcacagagactaaaaacaggggaagagtggttccccacagggatatgggggtgctattatctgatgaaggggaaggactaaatcctggcaagatgaatgtgtgtctgtctgcccctccctcaggcagggacaaagtagaaatctgacattggtcatcaccagagtagttaccccttaacttccccttcccccaccaaccatatatcctgaagacattgcccaggccacatctgtcttttaggagactgtcacagagagaaaagccacagagccaccccagggcctatctcgtgccatgtcctcgagggatggccttctgcaggatgaggaagaggaggaaggtacaggcaatgggactgggagtgaaattatggcctgaggtctgatcagccacagagaggctaaggtttggggttctgggtgtggtgcagtagtgtgcctttgattaaatggcttccctctgtgtgcccccgttgtcccctcagtaagtggggataaaatgccctgattcaccctcagagggatggaaatgtgtagccacagagtgggttcttgcggcctgcagaggaggcagctgagagcgaggaggatgacaacctgtcgtccatgctgcaccagcgtgctgagatcccatggcgagcctgcgccaagtacctgtcctccgccggcatcctgctcctgtcgttgctggtcttctcacagctgctcaagcacatggtcctggtggccatcgactactggctggccaagtggaccgacagcgccctgaccctgacccctgcagccaggaactgctccctcagccaggtgtgactggcggcccatggcagaggttgggagtggggatgggggaagggctgagcccatgggcaccctggaactccaaatcactctctgcctgtgaaggagtgcaccctcgaccagactgtctatgccatggtgttcacggtgctctgcagcctgggcattgtgctgtgcctcgtcacgtctgtcactgtggagtggacagggctgaaggtggccaagagactgcaccgcagcctgctaaaccggatcatcctagcccccatgaggtacccgtctcccctggccaggctgggactgtgagcaagtcactgttctctgagccttagtcttcccatctataaaatggggatatacaacctgtcacaagcttgtgggggtgactcaaggagacagtgtgtgtaaaagtgccctccttgtgcaagaagcagggagaaactggcatttactcagccagatactgtgataggcattgtgtgtggttagctcatttaattgttaccatggccctttaaagtgagcgtctgcacatccaagtaaagattgttttctcctccctaagtgggtgtaatttgcccatccccacccatgagttcagctccctgccctcccctcactctctctccctcagccagcctcaggttttgacactgggggaacaggtagctgttctattaataatttcctgtaatgggatggataaaaatctcaaaggccacttgatgtcaaagaggtttaaagttgtccctgcccaattggttggccaacttggcttaaaaacacaacaggcaaacagattttctggccccttgtcgaggctagacctcacaatctaactgcactttttactttccagcctcatgagttttctgtggcccacagatatggcctccaagtttatttacttttactctctatttgccccagctctgtagttctgaaactccctggttggggttgggctgactctgggtcagccagccggcaggctgtccccagggccctgttcctcttggcaggttgtccctctggagaggactctgtgtcccaggaggacagctgctgagtcaggccgagccggcagctgagaaaggcggcagtcgtcagatgggcttgagaaactgaaaggctaacgaaaggccagcgcccctttgggcagctgcaggaattcacggggatacaggccagatgtctacaaattggcagaggatgccagacccatgaatgactccagagacacttacatgaaataattaactatctcattcagtaaacaggaagtaaatcaatggacaaatgagtaactcttcctctggctgcctcttaggttttttgagaccacgccccttgggagcatcctgaacagattttcatctgactgtaacaccatcgaccaggtacagaggaccgtgccacactatccccccttccagagacacctcggacccctgggggcttctcctgtctgaggctgggttccccagatcaggtgatcacagccctctgggaagaagccagtgtccccgatccgattataatgctgcttcagggctggggcctccctcgtgggagcctcacagtaaggctgagggaaaccagatccctttagcttccacctgagatcccactggctttctctagtaaagttccagcatattctgaaccaaggtggctgattgtatggagaatattcattttgattcagcctgtgttctttatttaccattgtaccagatggtgtgaaaacaaaatcttgattcctacctcagggagtttaccttgtagctggagagatgagatacgtgcctataataaagggagagcaaggccgggctcagtggctcactcctgtaaccccagcactttgggaggcggaggcaggcggatcacttgaggccaggtgttcaagaccagcctgatggccaacatgatgaaaccccttctctattaaaaatacaaaaattagccaggtgtggtggcaggtgcctgtaatcccaactacttgggaagctgaggcaggagaatcatttgaacccaaggggcagaggctgccgtgaaccgagattacgctgctgcactcaagtctgggcaacagtgagactcagtctcaaaaaaataaaggatcaaaaaataaagtgagagcaaaacatggcggccagtagcactctaaacacagtcaataccaaaattcacctcactctctccccctcgtctccctcagcacatcccatccacgctggagtgcctgagccgctccaccctgctctgtgtctcagccctggccgtcatctcctatgtcacacctgtgttcctcgtggccctcttgcccctggccatcgtgtgctacttcatccagaagtacttccgggtggcgtccaggtgatggcctcaggggtgaggggtgggaggtgctttgcaatgtgcagtttggtgtacttgctagactcatcgttatgagagtaatagggtcgtgttccctccaaaaaataaaaacaaaaaacagaaatgaaggaaatagaaatatccacatcttattccaccgccctaatataatagtctgccaacacacgcacacactgaggttgacatctgaattatttccttgggcgatatggtcaggactggaattgctaggtcatgataaatgcacattttatgcccttcattcattttgccaacatgcttcccaggagggttgcatcattctagtggtcaggctgattgctgatgcatgaaatcggcgggcacctgattcaagcagtgttatgataacacctcccagcccacgtgagtccagagtgtagctgtaagccttgacttgagggagcctctcacagccattctcatggatcacatttgccctcatgagctttggatccatgcacgcctctttcctcctcaaaattttctaagaatgttctctagggagttctttctgggagtgattctcccagattcatagaaactcatagattcaaaaaattgtaggaaaaaatttaaagaacgtctaggccagtgtttctcaaactgccaattacagcccatcagtgggtcatgaaatcaatatcatggatcacaaccagcatttttttaaaaatgaaaaaaacatcagactgtattcatagagtaaagcaagctttgcttcatgaaacctttgtgttggtcatggaggtgtgtgagtactgatttgtgagataaaatatatttctgactgcaggttgtggtcagaaaggttaagtacctttcccaagtgcacatagttggctagaaactagagttgagatacttattagcaataataaaatttagatgcattttggacacaattacctgccccaaaggatcaacatttgtataaatggctttttgcttggatgatccagaatggcccgacacccacacgaacaacatagctttttgacactcaaaaaattcaaagtgctgcacaagctgttctacaaagttcatttcttctgccagagaaacagcccagtctctgtggcacccagtctgaccctggagatggtttatcagggaaatcaacttcctgcatcccaaactggcctccctggcactgatgtgcttgtcgaggtgcagctttggggagcaggaggcaattctgttgccatggaaacctctggccttaccccgagacgaaacctatcatttcagcacatcactggccagggtctaaagagctccttgatggggtaagcggaagacggggttgaacgctttgagtttggtcttctgttcctttggccagctgtctcaaggttcagattgttcacctgtaaaatggaactagcactgcctgcccagccttagctcagctccaggctgtgcagcagaagtacagggacagatggcgacctggggttgacaatgcccaggacagcagtaattgtgccccacatcaggctgtgtctaagcattgtacataaacgatctcattcagtgctcacaaaagctcaatgggctggtggcattgtcttcccccttcacggggtaagaagctgaggcctagagaggtaaggccattcacccacacagcggtagcaggtggagctaggcttcaggcccaggccgagccctgagcctgccctcttaactgttccactctgttccccgccacagggacctgcagcagctggatgacaccacccagcttccacttctctcacactttgccgaaaccgtagaaggactcaccaccatccgggccttcaggtacgagtccacattcccccaaggtaggagtggaacaggggtggggccagggggcacaggccatgagatttgattctcaggactccacttgggaaggccaaggacacgttctctctcaagctgcctcaggtcccaaggcccaagggatatccaccagcagggacaggccaggtgggctcccactgaatgttctagagaggaaaattccagctctgtagacaagcccaggacctctgtgaggcagagcatgaaaagagacaaagctgggacaagtcttcatgtatcaacgctagaaagggccttaggtgcgggccaccctaagcccttcttttattaaggagcccctgtgtgccaaacactatgctgagtactgtacaggccaatcccactcattctgcactgcaaccctcggtgctgagaatggtcatttccattgcacagacaaggaaactgaggcacagagacgttctataacctctctgtgtaaggtgccacaaagcccagacttgaacctatttgttcatgcaacaaacatttactaagccccgactatgtgctaagccccatgccaggcactaaaaagatgagtcaaataagccgctgccctgcaggcgtttacagcccagactttgagcaggccaggataaatccacgtgacaagtattctgaaaaaagcggattcaagggctgtgggagcatagaagagagacagtccgggaaggtttttgtaccagaggtgtcatcagaactaggactcaaaggaggggcaggagttcaccaggctgaggaattcctgaaaacttcagtgcccctgccatcgtctcactaccctgagtggtgatgttggggtggacaggagcatctgaggttgcctggggaatgagggaagctgttgtttcccactccccaagagtctgtctgatctccagaggcatctctcttccagtcaggcaggccagagacccctgacacacaaagttgggctcttttctcatcttcatccagagagtgataataggttatttttagggtggcacagctgcacgaagtatgacagtaaccatgagacaccaagcactgtgtccaggagtaaccatagggcacaaggaccagccaagggccagagaggcttacatctcctccccccaacccctgaagtccagcttcagccctggagaggtatccaggcccctctgcccaccctggagcacctagggccagtggaaatccacctcttagggatcttgtctaagtaaagaagagcagagcaaagctctgccctggccttggcgctgctccctggacatcccttgcccctggacaagcctatgctgtgtcttccacaaagaagcttgctggggactggattatgactctagagtctcctcccagcctcctcttctcaagcctgaacttctcccgttccttcaacttccaggtccctcgacattactgagcctagcctttgctctaagttttggtgatttccctctctcaattggtgtctcagagggccctggggtagagagatggtgactcttctagagtgggccacagccccttgtgtgcagatcccagcttcctgtaaacagcctcagatcaggccaaacctgtggtcagccagagccactgctacccagtgaggtcttccacaccctactgacacggtgaatgatttttaaatttgaatgaaaggctttttaatcaaccccatacacatttaatgcattggctttaatccagcagcctgttgagagctattagcacttattgattgcccacttactgtatgccaggcaccgtgctaagtgttgtatgtgcattattacatttaatcctcacaaggaccacataacataggtacgaatcgccacattctccagatgcagaagcgagacccagagaggctgggtaatcaatccaaggtcacacagactgcgggggctggcgctgagcttggaacccaggtttgcctgaccttctgggctttcctaagagatcttattttttcccaaaagagtttcaagagtgcccagcactgggctcagtggcgggctcggaggttgttttcgttcatgtaggaactatcacttccccatttttttcataagaaaactgagtctcagtcctgatacacagccaggaagttgtgatgttcaggctccaacctgggtttacatggctccgaggctggggctcttttctagtcctcagacacactgtcgcacgcctgtggcagaagctcccatctcacacttgccgaccctcaactcacacagtcctgagacccacatacgctgagcgcctcacactcctataacacgcacatgccctgatgcacacacattttcaacacgcacttactctacccttcaggcatggtttcacactcactgcagacacgtcaccctcccacacgtctccaccctgggggtgtgcagtagcatgctctctcccacctcagaacctcccttcagtcccctcagacacatgccctctctccacgcagagacaatcaaagctgaactaacaccttccagggtgaaaagcaaatgcccagtaaggtacgtcttgggtgcctccgtgtcccctgagtttggtcctatcaaaccagcgatgatgaggcagcttttctttcgttccttcctccatcatcaaacaagtgctcctgcatctcctctgggccgggcctacgtcagcaaggtctgagggaagcggccaaggagagtgatgacggcagcccaggttgatcagagaaaggaggcaggtccatgcgcagtaactcagggaaaacatgatgaggacctaaggatgagaaagaagcctccagagttccctgtgcagagagattccatcaatttcagagggtcaggggagtgccatgcattcatccaacaaatatttattgatagtgccaggtgctggggtatattggtgaataaaacatcttcatggaatttgcagtctattgagggagatgattataaatagctagagaaatgcatgtacagcagatactgtggagcaaacaggttgcagacaataataggggaaacctactttatagtaaggtagtagccaggaagagcctctctgaggaggcagcatttaaggcaagccctgaaggttgagttgagccagccttatgaagagcaagggcaaaagccttccaggaaaagggaatagtgtgtgcaaaggccctggggtagggaagactttagtattgtcacagagcttttaaaaagctgagtggctgcagcatagtgtgtggggtgtttgtggcaggaattaggttggcaggagggggttcttcatcctataagcagtggaaggtcattaatattcttttttatttgtttttttttttttttttttttttttttttgaggcagagtctcactttgtcacccaggctggagtgcagtgaggtgatcttggctcactgcaacctccacctcccgggttcaagcaattatcctggcttcctcagcctcccaagtagctgggattacaggtgtgcaccaccatgcccagctactaatttttgtattattagtagagacagaattccaccatgttggccaggctggtcttgaactcttgacctcaggtgatccgcccgcctcagcctcccaaagtgctgggattacaggggtgagtcaccgcatccggccggagatcattaatattctaaacagtgggggagaggacacagtttgcgatttagatagattaagccagccactgtgtggagcatggactgtagggagacagcaggtagacgtattcaggaagctgatgcagtagtccaggtgagagtttgtggtgggcaggaagcaggatagagggggagggaggcaaggactcttttagagagagacataagaggacttgccaaggggctgaatgtgaatccaggtgattcctgggtgagaaactgggtaaagggaggtgccccttattataatgggaaagacctagagaaaatggatcttggggtgaaaacaagagtttggaggaggtggggattctggacaggtttgaataagcagaaaggagtggggtggacattccagagagggatagcttacatgaagtggccacggtggcatgtctggggactggaggggccctggagcctccctctgcaggtagggagactcctaggagctatgtggaccaacactgttcccttaggagcttctcatcctccctccaggtatgaggcccggttccagcagaagcttctcgaatacacagactccaacaacattgcttccctcttcctcacagctgccaacagatggctggaagtccgaatggcaagtgctattcccctctaccctggcctctgataggagggtggggccagagcaagagcacacaggtacctggggatgaaagagaggataggataccagatcgtgtggacaccaagccttcctgcttcccccagccctggtggtcctcctagtgtctagcctgtgctccttttccccatatcactgcctggaggcttgtgtatctgaggtgtgtgccagtggcaagaacagttgtggtgaatgtgtatctgcagtgggtcatatgacacccacattgtgtgtgtttgtgggccagctgaggcgtgcatgttaaagggtgtgcaggggctagggggtaggggagcatgagcttgtgggacatgttggctcctggggctccagccttcgcagcccttgtgtgtgtctggtgacgtgtgcatgagttgcagggctggagtggaggcctggctgagctgctctctgccccgaaaaggagtgaggtagaacaggggcctgtggctctaacccctgagcgcccaggtcagctcctctccctccccaggagtacatcggtgcatgtgtggtgctcatcgcagcggtgacctccatctccaactccctgcacagggagctctctgctggcctggtgggcctgggccttacctacgccctaatggtgagcggcagtgggctagggcagaggaggggtcagacaccagcactcccggagcaccttcgtcactggagacatgagacactcccaggccttaccccaatttcatttgcatctgatgccagagggacagtgcgggcaggaaggctgaccagcaggccccagggcccaggccccagacaggtggaggttggggagccacatgactgaccctccctgtgcctccagggagggctgctctgagcaggcagtggatggcagcaaaaggaatctggggccctggcccctctccagccttaagaagagccattctggtggctgaggacagaactaagcgaccatggagtgtgcgccactggcttgctccccacaggtctccaactacctcaactggatggtgaggaacctggcagacatggagctccagctgggggctgtgaagcgcatccatgggctcctgaaaaccgaggcagagagctacgaggggctcctgggtgagaggctcagggagaggggtggggaagagtccaaggaggagtgtgtctgggttgggggccacaagggagcctggggatggggtggcactttcggatactagctgtggcccatgcctggtggctgagcccagcccggcccccagcaccatcgctgatcccaaagaactggccagaccaagggaagatccagatccagaacctgagcgtgcgctacgacagctccctgaagccggtgctgaagcacgtcaatgccctcatcgcccctggacagaaggtcagagcacgggcccaacccaatgctgcaggacaggcgtgagcaggggatggggcatgcacggagctggatggcttcgcagtcacctcgtggccctccagggccgaggcctctcactattcagacatcgcagtctcctgccctgggcctgtgggggcccatctttcctctccttctattgccttcccccagtgctgccctcaggccttgtcttctcactcatccaccaaggagaccgacactctggactcccccagctcacacgggctttgtcagggcctccctctctgcgaatggtcaggggctttccctagggcactgccccgagcttcagggcagggacctgggggcagacagcgaggccacccttgtattgagggtgagcccctgcctatggccctggcccagctctcctctcgtttcccactctgtctctttgtctctgtctcactttgctgtggctgtccatgtcattctctgaccttgggatgtacctctgtccctgcctctctcatccttctatgtcactatctgtctccgtattgtaatttctgttggtacccaagtgccaggaagcaacgggatcagaggtggctccattgtagggcggggcacacagacacatccatgcataccactctcagctgcccctgtgtcctcctgccacacccatgcccatagagacacaccactgccccccagctctccttcagccaagtacccggcacacccagacccacaccaaggcccaggcaaatggacatccatgcctgcacttgcgtgccggtccctgtgtaagccctctctggacccactgcaggaaacaagcccaaacctgtggtgtccaaagagaaactagtcagaaaaccaggccaaaaagataccctgtgacctcccacacctgcacacacacccagagctagcatagaggctattcccagcagccccagagtcccagtggcggtgcctgcttctctctttccagatcgggatctgcggccgcaccggcagtgggaagtcctccttctctcttgccttcttccgcatggtggacacgttcgaaggtgagttgtaaggcgggcaccccacgtgtacccacagccaccagatgaggcctcagccctggcacgtggtcagacatgacaggaggcccagcagtcaccgccttcccctgcaccctcactgggacccatgcagggcacatcatcattgatggcattgacatcgccaaactgccgctgcacaccctgcgctcacgcctctccatcatcctgcaggaccccgtcctcttcagcggcaccatccggtgagccccaccacccctcaggcccacccagccccaggccggctcagttccatcagatctggagcacaaagaggagggggttgggggagaccaggatcccagaggtgtttcctgctcatgcccttctccatcccatcaggcccaggcagcctctggaaggggatcccccacccatgggtctaagatgctgtcccccacccactgccaccacctcggtgcttctcccagccagacctccaactcagtctgctctcgctcactgccctctttgccgcctggggatgcaggcaggaccctgctccctccctactggggctttctgtgccacttccagatttaacctggaccctgagaggaagtgctcagatagcacactgtgggaggccctggaaatcgcccagctgaagctggtggtgaaggcactgccaggaggcctcggtaactactcctggctatgcagctgggttggttgggcactcaaggaccctgtaaggatggcagacagaagcccgtgtctcaggtttgccccaagtttggagtctgaagcctggcaggaccatttagtcctacttctcactatacgggggcccagagaggtcaggtgtcttgccccaggtcacacaactggtcagttcagggtctggctcctcctgcagggtacagcgggtacagtcagggatccttgtgagacagagattgcgagtcccccatgccaagggggcatcttcagccctgccctgccccatccacctgcatgcccagttctgccttaggggaggagaagatggactgggcaatcatagacacgggtcactcatcaaggccaccggtgattggcaaagccttggtatatttgctgcagctcctggagcattgggggtggccaagccttggtttcaatgaatcaccctaccaaggccctacatacacactcagtgcacccctcagtgcacacgccccctcccagaactgcccagggccacagcagcacacacctccaggggtgcccttctcgttgcagtccttgcagacggcctccacattgttgtgtcaggtgcaccagccctgcacacgcctgtgctcttggacacacacccacctatttgcccccatgcacacattttccaacagccccccaagccatcccatctgctccactcacagcacaagattaactcagtcctacttcatctccccgggctgttttcagatgccatcatcacagaaggcggggagaatttcagccagggacagaggcagctgttctgcctggcccgggccttcgtgaggaagaccagcatcttcatcatggacgaggccacggcttccattgacatggccacggttggtcctgggcccctccatgggaccatggtcttggaaagggtttagtgggatgctagggagaaatttgcacgaagtagtcctgaggctcaagttgcctctaacatcaaatgctatgtgttgcagaaaatgaaaagagctggggggaccctgactctgtctagtcttagggaatgttacacacacacacgcacacacaaaaacactatgcaaacacacacataagctgcacacacagacccacacagacttcacactgtcacctatcacaacagcacacacacagccacaaccacaacctacatacacacacagagctgagctcccaacaggctgagtccagtccctgagtgccgggaacctgttcagtcctgtggggtgggggtgggactaggatcggggtcagatgggagctgagccacagacctgggctccacatcccccaagccaggccagaccccatccactgggcaggtgagccaacagctgttgcccccacttggcaggaaaacatcctccaaaaggtggtgatgacagccttcgcagaccgcactgtggtcaccatcgcggtaaggggcccattgatggggtgcagagggacacccagggacaggactggcctgttgtggccgtcatcagtgcacagcccctgggcttgcctggtcccagtaatcaagaaagaaccctgaagcaggcagttcagggcaaggggcctggagggcatgcagggagcctgggttgcaggatttggggtggggggttttgcccctgtgcttccctcagacctcccctctccttctccaggttccaaggcctgcccctgtcccaaggccttatatgttaggctggcgttacttctccataggaagtgggggaggggttgtggagggtctctgagccttgaagcctggaggtggggtagagttgggacttggagaggagagaagggtggtattagcagatggagagcttgtagtcacatccaccccaggaaagtgcagtccccacagtgacaggacattctggccacatgcctcatcctcctcctccaagccgcaggagggccaccctcagctgtggcccccaccgcgggtggtattcccaccatcctgacccgccccctcctgccctgcccagcatcgagtgcacaccatcctgagtgcagacctggtgatcgtcctgaagcggggtgccatccttgagttcgataagccagagaagctgctcagccggaaggacagcgtcttcgcctccttcgtccgtgcagacaagtgacctgccagagcccaagtgccatcccacattcggaccctgcccatacccctgcctgggttttctaactgtaaatcacttgtaaataaat

SEQ ID NO: 15313 - DNA, 83834 bp, Homo sapiens
gcggcagcgagaaccactcggccgcctaccgggtggaccagggggtcctcaacaacggctgctttgtggacgcgctcaacgtggtgccgcacgtcttcctactcttcatcaccttccccatcctcttcattggtgagtgcgcgcagcgagccgcggaggaggggacgggagagcagggagggaggaggaggcgctgcgcgccgcaccgctcggcgtccccttccggcccgcgaccgccgtccgcctcgttcccggggtcccctgccctgtgtcctgcccgccggtccccgcactcgcacaccagctcatcccttcactcccccggtgcccccgatcccgcgccaaacacagcggacgtttgtgacccatgggatcaccaagttttgcttctgcagggccaagagctgggatggggaaaagggaaagaggaggtctcagcacgcagtgggaaactggagaggggtcgggcctcaccctccgtggcgcagcttagggagccgggtcacccctcccgcaaggcagcctccctgtcagccgcagctgggcctagggaagagggaagcctgtgctttggagtctgggatggaggcccagctaacccctatgctttcaccgggctgagccgcgcagtggtccgtgatctctgacagtcccaggcccgcgccctgggcgaggagaggcgagagctagggacttggattcccttcccccgccaccccacccgggcatgtgtctccagagcgcaacttctcaggctctgcgcaaagtagctccgactcgccgacgcagcgaccccggcgcccttgcttgcaaagttgggcgccacggccgggacaatcgtgcgtgcctctccactgaggtcccccccatctctctccaagaccttgactcttccagaccagtcaagtctatcaactcatagggtgtcccctgcatccccaaaacgtgttcattcactttaagaaaacaagcaaatcttaaaattcatatacagctttggggaagaaaggaaagattgtcacaaaattagatttacaagaggttgctgcagaagcagagttgctagttattaacaaagacagttagatagaaatagaaataaaacatacaaaatatgtgctcatatgtgcatcaaaaatcaaaaaagaacagcatttacacttctgttctcagccaaacggtttattaacctgatgacttgtcacacaagaagttagtatgtataatggggtaccttggcagggcacagtggcttacatctgtaatctcagcattttggtgggctgtgacaggaagactgcttgagtccaggagttcgagaccagcctgggcaacatagtgagaccccccccgccctttctacaaaaaattaaaaattagctgagcatggtgatgtgcgcctgtagtcccagctactcaggaggctgaggcgggaggatcacttgagcctaggagatcaaggctgtagtgagccgtgatcgtggcactgcactccagcagaggcaacagagcaagaccctgtctcagtaaaaaggtgtggtgggggaggtaccagcataggaccaggctgaatgagttggacgtttagtttgtgtgtaccagccttggggatcctcatgtgtaggtgtcaccctcaccatggacccaatgcccaagcacctttctggggttcatgcaccctcttcctcctccaagtgggcaggcatcctgcctctgactgtctctccctgcaggatggggaagtcagagctccaaggtgcacatccaccacagcacatggcttcatttccctgggcacaacctgcggtggatcctgaccttcatgctgctcttcgtcctggtgtgtgagattgcagagggcatcctgtctgatgggtgagtgactgtctgaggactcaggaaagtgaatctgctccagggtacttcctgaaaggcccaaggagatcctagctcacctatattccacaagcccatgtcttttgttactacatccagcagctcagtgtcttctatgtgccaacctctctgagctgggcactggacgcaagtgagtcccaggccctgccatcagtccaggagagcagagggaacacggacctgcatgccaagtcccagtgaaataatgctagagcctattagaatgccacaactccagtgaaaaatgtctggcctcttctacaacctgccggagttaccttcttggaaaaaaaaaaaaatctaaccatgccacccactcttgcataagacctttccttggttctcagctgttttgaagatgtggtctcagatcctcagcccaccattcaaggtcttcacagtcagccccacctatctctggcctcattccccatgcccaccttccgtttgggcctcacagcacactcctcacacctctgctacagcacagatcacactgtatgttaaagtttatgtctatttgcaaaactgtcttcagagtcagaaaggcctaagagttagaatctgagtcttgttcatctttgtgttcacagtgcaaggcatgtgataaacataaacattattcagtccataaacatttattgggtccttaggagaatgaatgaaaccatgttacaaataagtactctgggaggtgagaggaaggcagaattgggcaagctccatggttgagagggctttggagcggagtctggaagggtgactaggcttcagacacacagaggaggaaggagagagagaactggtggtgcctgagggaagggaaaaggcaccaaagagaaaagcaggtagggctagggagcagcgcaggggctggagcattaaacacaggctggggagcgatggaggctgaggctgggaacccaggttggggcatctcaggaggactgtgaatcccagcctgcatgtttgggtcggatttggtcagcagtttggaacagaagagagatgtcatcagcataacacttttaggtgggaacctgaggtgttcagcgcaggctggaggcagggagaatctagaggtataatagaagcaggacttagcattgactgcagtagtctaggtgagcaataactgcagacagaaatggtgtgtcagcagtcagggacagaagaggagcgggagcagccatctcactaaggaagaatccagtaaccagcaaggatgagagactgccaggagagggagtggtggaggagagggatatttggcttgagtatctgaggtccagcgccccctgagctggaatcagattatacccagactgcactcctgcagtgctgcctggctcctgtagttggatggcaggggataggctccctcatcctccctcccgttccccaccttcccttccccaatgtccctgcatcctggcttcagcagtgatctctaaaatacctgcttgacttggaggcagcagctctgcctgcttattaaagtccctagaccagcaagaagaccagaaggcatactgctacacaagcacgtgacaagtccgcctccacccccacccctacaccccttccaaagtagcacaaatgccacagtgagccctcagatgggaaatactcaccagatggtgacagagaaagacacctccgcccttggagaaggaagacctgggtcttcagtgagcactgctgctgtgtaccagctatgggactttgcacaagtcattcaggctttctgggcctcataagcatttataaacatacgataaaacattttagttgccaacttaaaaatgtgtgagaaagtataaggtgtttcaaaattatttcaaggagtaaagaggcaagagttttgaagatccctgggcagggtgttggctgttcccagtgtggccattcatgactgctctctggccttatgaaacaagcatcatagtccctggcttgcctgcttcatggggctgtggagggtgaaattcgagcatggacagggtgcagagcccggagtggcagagcactgggtagactgtgtattcccagaatgtgggaaactggaatgaatcggtccagggatgccctcctgctggctgtcagcagcccctcctgtgtgtggctgtactgcttcagctcagtgcaaagggccatctcctccccagggcacagatcagctcaagctgagtaattgtcatctggtctttgtgagctcctacccccaggcctgagtgaggggcaggaaaagagcagacaggagaagtcacagacccttgtgatacctccagtctaatccagcctgggttttcagagctgtctggaaatttagggggcaggtgggagggggctgattaaggcagccctgatttgatttagagtgagcctcatttagtgactaattaagccatcttaaacctgtagggcttcccctcttcctttgggtattatttctttctgtgatgttctgaattcagaacaatcaaaacagtataagttagtgaagaagatattttttaataactacaatattttcccagaccaccatacactggataaagcctgtatataaaactttacctaatttcttaactaattgaatgtgtattatttaacaaagcagctaaaaactattctatgaagccatgtcatgaaatatttagttcaattatggttaatcctcatcttatttcgtcttataaaattttaacatttctacctcctattgcaaaaaaaagcatttatatcagcatataataaaacatgtctagatgtcagcttaaaaatgtgtgagagagtagagggtgtttcaaaattatttcaaggagtaaagaggcaagagttttgaagatccccaggaagggtgttggctgtgcccagtgttgccattcatgactgctctctggccttgtctgtcttgtaccttctatattagtttgaagaccttttttggagaatattcactaaagaatatcaatatctaccatttcattaaaaaagaaatgtggagtttgccttttcaagttggtttgatgcttattgatgttttcagggacccagcctcttcccatctttccataccatcctgtgtgtgtgtgtcagcctatcttccccatggtcacaaggtggctgcctagctccgggtattgcttagcatgagcagagagggcatgctgccgacatgcctctcctttatgacagagatcattctttctttgacatctcactggccagaatacgtggaccaacactggcaaaggagtatggaattgcatggctgcttaaaccaatcaccatccattccctggggctgggtatattgctgctggagcaaacctgtggtcctcctggcacagaataaggggaagatactctttggtggacagcccacattgcctctacacttgcacctcagtcccaccagacccactgaggtcacaggatagctctcctcatgtccttcctccttctctgttgaactcttatgtatccttcaaagtccagcctggtgccacctcctctgggaagctgtccttggttgcccaccccctcctttgtgctctctcagtctctgtccatcggcagtatcacttccctagcctgctgactccaacagttagctctgagcatggcagccccctccataccatcagcttctcaagggcagggacccttggcacactggatagaagtagcctggtgggcaacagcagcactgaggcagcaagctgtagcaggccatctgggaatggagtgggtaccacagggctggagcagaaagggcaggctgggcagatctgataaagtggctggaggccacatagcctgggcctttcgttccaggctgagcagagtgggttttgctgtctgcaggagggagctgtggaagggcatgatcacgaccaactaaggtgaccctcctcaccaggcccagggaagactgaggcctggaaggaggctctggctgcctctgggtcttacccccaggccacagtccacccacttagaggcctctgtgagttaaggtggagagactatgagctggtattgactgctccattccccatcccgagagaggagacaaaatcagtgaccttggaaatgcctcttcgtgcctcagtttcctcaccccataaaatgggagactaagagtacccactcgatggggtttaatgaagattaaatgggttaacatatatcgcatgcttagaacagtgcctggcacagagtaaatgctccataaatactgactctcatcagtttgttatcacagcctctggggagggcgccagtgctgacttatgctgttcgtgttaaatggggctgtcactgggtgagttgtggcatacaggcccctgcactgttcaagagaccccagcaacccttgtgcttagggctcagcacatagtaaggcctccagatcatatacccagctctactccatgtactggcagctctgcccagcccataccccaaatacgcccattaactaaagggccctgcagcctataaagtgatgctataaaggttcagtgttcagcctttgaaattcaaggcctgggctgctctattgcagtacttagcatgtccccatcctgtctgtttctctctcccatctcagggtgaccgaatcccaccatctgcacctgtacatgccagccgggatggcgttcatggctgctgtcacctccgtggtctactatcacaacatcgagacttccaacttccccaagctgctaattggtaggtgaggtgtaggagggaggggcagtaccttcattcatttcttcagataatgtttactgaggactcattatgtgccagctattgctctaaacagtagagatttggaatagaaaaagaaaaaaatccctgccttcatggagcttacagtctggtgaaggaggatagacaggcaaagacagtgaataaacaagcaaacaaataggtggtggggatgctatgaagaaaatcaagctgagtaaggggtaggggcaatgacaatgttgctatctacacaggatggtcagggaagggctgtggtaactgtgggcatgcagatatttgggggaaggtattccctgcaaggggagtgacaagtgcaaagtcctctgatagggatagatttggcaaagatgtcactgtgggcaaagccaaatgagcaaggggaagagtgggaggtgagggcaggcgtcaggagaggagcgagcaagagtcccaggctctgggcctgagagcctgggtgaactgtggcatcaataactgatgtgacagaggagggggaggtgggctgtggtggggataaagttttctactgggggcatatcgagtttgagatgtcacagagacagccaactcaagtgtcaagttgggctttcatggggaggtcaggacaggagctacactttcaggaggtgggccttgtagatgacatctaaagcttgagcctggggctggctgccgtggctcacacctgtaaccccagcactttgggaggccgaggtgggcggatcacccgaggtcaggagtttgagaccagcctgaccaacatggagaaacccccacctctactaaaaatagaaaaattagctgggcatggtggcacgcatcggtggtcccaggtactcaggaggctgaggcagtcaaatctcttgaacccaggaggtggagattgtagtgagctgagatcgcgccactgcagtccagcctgggtgacagagcaagactccatctagaaggaaggaaggaaggaaggaaggagggagggagggaagggagggagggaggagggagggagaagaaagcttgagcctggatgaggtcacctggggagagaagagaaaggctctgggaccagagcttgaggtttgctaacatttagagagactcgggaaggactgcccacttagagcttctgagatgttaaatactgcaggactggggtcccaggcagaagcaacaggatgatggttggtgtttactgagcatgtgccatggggcaggctccatgccatgttccttacattcattgtcccacaggctaattcccccagcctccttattggtattgttaatatccccattttccagtgtggaccctgaaactgagaggttaaaaataataacagtaaatactcactttgtacttactgtatgccaggccccatcctacctatgtgatatattaattcatttaatccttgcaacaactctatgaggtaggtaccattattattttccctttacatatcagaaaactgaggctcagaggttaaataactggcactagtctagctcgtcaaggggcacagccgggagtctagcatctgtgcaatctcctaatcatttctgagactgcgtgtctaagggccctcagacttcgtccttggggtaaaggtatcaatccgcaggtctgcctctgtgttggggttcagcctgtgtgtctaaggctggggctgtacatctggcagttagactttgttcacactatgtccttaagtcagactgatttttaggtatcacagcatcgaattgacatttggagtctggcacactctgtgctaagccagtgacatcatggtgttgtcagggagtacagggtgtttcttgcactagtcacaggtctgcctttctgtagaaggtgggatctgagctccattaggattatccaggtgatccccctacccctagcccaggggcccccacatgagtatgaatgggagctgggggaagcaggttgagaggggagatgttaaatacaggcttcagagagccaccctgcttccatttctgaagtagctccttgtctgtagagaacccttcattaaccagggcctggctgaccagtgtcctctggaaacaccctgtctggacatctgaggagttcattttctcattctccagcaaacacataatgttctctctttaaagcacaagttatcacccgtggatggatttgtccttttctaaggaacaaagactaactccctccattccccttgttggagttatctccccttgaaaggacactccacagagccagaaattctagaacagggaaaagtggaggggacgtgcctgtgaactgcagggacagaaggaaatgggtattgggagaatggccagccctccaaggggctgatgtctggcctgggtatggagtcccacagaaaggggacctgtgatgcagcttacattgtcccgtgagggaaccatgatcctggaacccagatgaggccaaggaaatgttctctgaaaaagtcatatttgagctgagaactgaaggaactaactgggagaagggaggaaagagtgcttcaggcagaggaaacagcatgtgcaaaggccccaaggcagaaggaacaaaacacattagaaaattcagaagaagaagagtggcgtgggtgcaaagtggaggggagctggactttgggttttgtttgcttgtgcccaggctggagtgcagtggcaccaccttgggtcactacaacctccgcttcctgggttcaagcggattcttgtgcctcagcctgctgagtagctgggaatacaggcgtgtaccaccacactcagataattttttgtatttttagaagagttgggatttcaccctgttgaccatgctggtcttgaactcctggccttaagtgatcaggtctcaacttcccaaagtgttgggattacagccgtgagccaccgcacccacctggaaggtcataccacagatgtttgcctttatcccaacagcaatgggaagttgtgtgtgtgtgtgtgtgtgtgtgtgtgtgtgtgtgtgtgtgtggtttaacatgtttaacataaaatttatcatcttaactgtttttaagtatagtgttctgtggcattaagtatattcacagccgggcatggtggctcatgcctgtaatcccagcaccttggcaggccaaggcaggtgaattgcttgagctcagaagttcgagaccagcctggccaacatgccaaaaccccgtctctacaaaaaacataaaaattagctgggcgtggtaatgtacacctgtagttccagctacttgggaggctgaggtgggagtatcatgggaggctgaggagagaggatcagttgagcctggaaagtggaggctacagtgagccaagattgtgccactgcactccagccaagattgtgccactgcactccagcctggacaacagagtgagaccctgtctcaaaaaaagaaaaaaaaagtatattcacagtgctgtgtagccatcaccactatccatctccagaactttttcatcttcccaggttgaaactctgtactcattaaatgataactccccatttctccctccttacagcccctgacgaccaccattctactttctatctatgaatttgagcactctaggtacctcatctaagcggcatcatgcactgtctttttttttttttttttttttgagatggagtcttgctctgttgcccaggttggagtgcagtggtgcaatctcggctcaccgcaacctctgcttctctggttcaagcgattctcctgcctcagcctcctgagtaactgggactataggtacctgccaccacgcctggctaatttttgtatttttagtagagacggggtttcaccatattggctaggctggtctcaaactcctgatcttgtgatctgcccacctcggcctcccaaagtgctcggattacaggcgagagccaccttgcctggcctatttgtctttttatgacttgcttatttcactgagcataatgtcctcaaggttcatccatgttgtagcatgtattgaaatttccttcctttttaaggctaatattctactgtatggatatgccacattttgtttatctattcgtctgtcagtgggttgcttccacctcttgactcttgtaaatagcactgctatgaacatgggtgcattgaggggttttcgacataatcataataattgctttatggagaccagcttggaggagaacaagatggggaggaagtgtggaaaccaatgagaaggctctcagggtatagcgggaatacagaggacgcatgatgatgcctggacttaggtggtaccacagggatggagagaagtagatagagtcaagctatttaggacgtgaaatagacagcatttgttaatgggagaggtgtggggcgagggagaagaatagagggagaaggaggagtaatgggagctcaccagcagcccccatgttatgcctctttccttccttttccctcttctctcatcaggcattcagcttttgctgagtacttctgtgtctgacaacaggctgagcactcagcactgcaggacaggactatgcaaaaaacctctgggcctagtcctgggtgcactgctaattccctgtgtgaccttgcacaagacatccaagctctctgagcctcggattccccacctgggcaggaagagtaagtccctgcctaagtcatagggttgtaatgaagagcaaagcagaccatatctgttaagtgttagggacaagacaagcatgaggcatattttcaagtctcggctcctgtaggcagctctcactaagggctaaagggcttctgatgcctgggatagaatctgtccggcagagtggagtggaggcagggggacagccttcagctgtggaattcctccagtcctagagaccagcctgagctgggggacattattccagtcctgaggcatgagagcagaaggccgatgcttctgccctccatcctaatgtcctcctgcagggacccaaggtggatggcatcgatccccccgggtgagctcagccctgggcgcatggtggggcccaacatctcaacctgtttcctaaccctgagccaggcaggacagatcccagatttgtgcccaagagatgctctggcatccatgcccaggcccacatagggatagagggcagggtgaaagtctctctccctcactcgggtcctctggagaggggctctgtgtcatgaagctgaccttatccgcatctggtctaggagggaggagggaaggagctgccagtgctaaaatctcccccaccctcaaagggggacttcacaggttattgctggttttggttgttggaagctgacagtgatttattggcagattgaagtgagtgtgtgtgcgagaatttaggatagaatctactgatagcttctgaggtttaccttccccaggtcttaaatctggagataataaaaatataacagctaatgtccaaagagcacccgctgcgtgtgaggctcactgcactaaatgctttccatatgtttctcacaagaaccttctaggtagcactattatgattcccacttaatggatgaggaaactaagctctagaaggctaagtgactaatccaaggtcacacagctattatgtcacaggctctgagcccaggtgtatctggctgcggagccaccaccactaacccctgtataacgctgcctcacagaactgtggctggctctttccgtatcccccatgcccctgctccatcatcatgctgtggtgggctctgaactgtgaggacagggatccaggctttcaccctctctctgtccctagctgccagtgcacttgggcaaggtcacatcctatttctgggcctcagtttcctcatctgtaaaatgaaaggctggattgaatgacctttaagatttccctcacttggaaattccacaagtaagtcattatagcatggagcttgcatgcatgggctccagcgtcaggccagcccagctctgccagttaatgggtgtgtggccttggatctgttacctaacctttctgagcctcatttcctttgtctgagaaattgggggtgacggcagtgtactttctttgaaaagttatggtgaggaatagataagatcatgtgtttaaagtgcttacttggcacagtgcctgtaacttagttaaattcaataaataaatttcccattcttcccatgatcatttatttttaagggacatttgtctgaccagtttgatttatgagattattggtgtttttcatgaatgttaagacgtacgtgcgtcatcttagagtcatgtactctgatatattcacacgtgcacatccacttactcggaaatgtacacacccaggcacgcttattctgtctccttctctgccacatacttgcacacattatgtgagtgtacacacatgatgcacacacgtctctgcgatcttccatctctcctcggcagccctgctggtgtattggaccctggccttcatcaccaagaccatcaagtttgtcaagttcttggaccacgccatcggcttctcgcagctacgcttctgcctcacagggctgctggtgatcctctatgggatgctgctcctcgtggaggtcaatgtcatcagggtgagggtaagcaggccacctgggccagggtggggtgggaagcagaggctctggcctctgtcctgccctgggttcaggcccccaccctgcttctcagccaaactgagaagggatcagcttgttttacccgcccgtgtaaaggggagtggggccgtggcggaaatttcaggatagacactgcatctggcccacgtgtgctctaccccagggtcccagagggagaggggggtgatgggtgtgttcgctgaggttggcggatgactttccgtagaaagggaagataagcatcaggcactggcctctcctactttctttcttcgggggtgggggactttgctttaatgtattcatatcgtcacgctggtaaatgaatgagtaagtgttttgttttcctttctgtttgctcccgcctccctctctcttcctcaccccagactccaaccttccccttcccctgcccctacctccccaggcagcccagactaatgaactcgtttgtctttcccatgctttgtttttattagtataataccatatgtgtctgtctaaataaatacctattcaggttttttcctctcaacacaagtgaatatgtaggtttcccccacggtatttatcttgtaagaatgggatcatattatgcagttttctgcactgtgcttttctcacccaacaaatatctcttgggactccctccaagccatctgatatggctaattccgttttcttaatggctgcataatattccatcgtatggatgagccataatgtgttcagctatttctctatggatgggcatttactttgttgccaagttcttgccttcatgaataatggtgtgttgaacatacttatatatttatgtattgctgcttttatttctatgggagagagtccaaggaatggcgttgctgggtcaaagggtctgtgtattttaaattttgatcagtgttacatattgccttccagaaagactgtaatctgccagcaatgagtgagaaaaccctttccctgccttccaaccagcagtgagggctacagccctttcgaacttggactgcctgcatttctctgactcttctgcttttagttggtgatctgcagggcacaaagctccttatgtgtccccccatccagtgaccctcacaggaaccctgtgatgcaagcaccatcccctttatagatgaggaaacattttagatgaggcttgtccaaaaacaccttgctagtaagtggaggaggcaggattcaaaaccaggtctgcatgacttggagttctgtgaactgtatatgaaacatggtggtatccttagatctgtggagaagatagcatatgagagattcctgctcctccccaacccaacctaaacccaacccagcctagccatggggggttcaaagtcgacctcaatgagcagttacaaagtcaggatgccctgacattggtggccaagaagtgttggggaatccttttcctggtaataattacaggcgaaagatggccccatctgttagagatcaagtgtggaatatcacaaccccagatccttgctggggcaaggtagggagtggtgagaagttggacttacccatcccccatggcccatgtgccccacagagatacatcttcttcaagacaccgagggaggtgaagcctcccgaggacctgcaagacctgggggtacgcttcctgcagcccttcgtgaatctgctgtccaaaggcacctactggtggatgaacgccttcatcaagactgcccacaagaagcccatcgacttgcgagccatcgggaagctgcccatcgccatgagggccctcaccaactaccaacggctctgcgaggcctttgacgcccaggtggtcagtgggggcacagccacaccatctattcactgccttctggtttagggtcacagagagggacctcaaagggcattaggtcaaaatcctggtgggacaagaggggaaactgaggctggtgaggggaagaagcttgccttaagtcacacagtgaaccagggacaggtgcagggctgaggattcataggacaggcacagttggaatggcccttaccgtttaggtcgtctagtccaaagtccttatccagatggggaaactgaggctctgagaagggaagtgaccccactggactctcacatccctgtgctctttcctctgcagcttactgactataaaggttggagtgttcacttgatttggagcaggggtgttagtggcctgatccttatggtaactctatgagttgagccagacaggaatctccccatatcactgaggagcaaattgaggccctgagaaaggctgtgacctgcccagagctggccacagctggcaggcggcagaggcagtctcctggctcccagtccagtgctccttcacttcctctgccctcgcaccagggcagttgctgaggcagacacggtggcaggtggtaatgagtgagtgtggcacatggccacctcctcattccagtgctgtgctcatcacatagtccctgaccagctgtgtgaccttgagcaatcatctggccttagtttccccatctagaccatgttggtgttgatagggccctcccaactgtgcacttgctgattccatgatctcttcctggagttcacctatttgcagaggatgtgaccactgggtttccccagacaacaggagctaggggcatcctgggaggctaggcccagccgtgaattagccctcaggcactctgacctggccatggtctctctgggcagcggaaggacattcagggcactcaaggtgcccgggccatctggcaggcactcagccatgccttcgggaggcgcctggtcctcagcagcactttccgcatcttggccgacctgctgggcttcgccgggccactgtgcatctttgggatcgtggaccaccttgggaaggagaacgacgtcttccagcccaaggtaggcagccccaggggtagggtaaggcaccctctagatggttttcagttgtttctgagagtgcaacaggccaatgtgtgtgagccatggccacactggagtggctcctcacacatgcgcaaagcccatagcagtatccccaccacagaatactctacatctggtcaacagaaatgccagagggcgagcctatgccccaagggtatcctactctcctctcaccgtcactaccatagtacctctcccggtagttaggtcagtccgaaaactgcaggaagtgcttttgtttgtccagtgtctagagcttctgtgacttggatttgttggctttcagttcatgtcatcttagtaaactctttaaaagttttcaagatctgtcttcttcagtcctgtaaaggctggcacttgagctttctgcaggggcatcttgggagctactgtcagaggagagagaagtgggaaaccctcacgagtggagctttgtctctccccactccaaatttcattcaaagctgcccgtagttttattaatatgttggacttttccattaaaatttcttttttaagaaaagtttccatggcttaaaaaacactggagacttattagactagattatatccaatggccttggcagttgtaacgattctgcaaactgaaatttgttggagctagaaaacctttccccggggttatttgccctgcgtggggccgtagcatccacttcgggggctgggcagactgtgctctgttgtctgtttccttgcagccgtttaggtttaaatggccacaaaatgaaaactttttcacccctaataagtttcagagttttagtttccaagtgaggatgtcattataacattttaaccacagacagtctgaaaataatgcagagaatggggaattagggtttttaataatttatgacaccctttgcgtaacatttgttcatctcatgagctccaaaatcgcagccagcagttaatcctcaggaggtttatgttcatttttctggagacataattagtcagctgaacagttttggccacagatatgagatacgttgagtctgatttatgcagcaaactttcattgaacactgctgtgtgccaggcctgggttgggctgtgggaatatgaaagcaatagttatgatgaggatgattaacaatattaacagccacttactgaccacataatacatacctggctgtgtgcaggagttatccatgtgttatttaatccctaaaactatcctttggcgtgagtatattttgcaacatctttactgtggtatacctcaaatactgtacagtttatgagatgataggtattcttatccccattttacagatgagaaagttgaggctcagaaagtttaagtaattttccccagggtctctcagctagttaataacagaggcagaatttgaacacaagactcactccacagtctgggcatttacagccaggaagctaaattgactattattatcaagccatcacctctggctccaaggattatgaaatccaacagtgaggagagaaatcaaaataaaatacttttatgctatgtgttacatgtgactcttaggaggaatattcagggaattgtgggaaaagatagtgattaacttagccagtggtcatgaacagcttcatagaggaggggatgtttgaaaggggtcttgacggatgagtaggaatttgccaggctgccatgggaagatttcttgctcaaccaagaatgcaaggaccacttttgcttatttaaactttgatggcttttgaagccatatctggctttttgagcctctctactttacctggcccataaaagagaggggaagcggctgcttctcttgtctacaggagtgtcacctttggctctagcctgaccataggctaccccagaatacccccattggcgatcctgaagcagcatggagccagttgttaatatcagggggaaatggcacaggccagagcccttatcagagtgtccacaccacgctcttcttcctgtgtttcccaaaacccttgtgggattctgctaaggagagagctctgaggcaggacgtgccaaagagatggcgaaagcacttagaattttagttcatctgaacgttatcattgccgtttttttctctttgtttatacacaaaccctggggtttattaccgtctcattggaatgctcttgtcccagttacttagcacacaaatccctgagacagatggccctgcctcagtggcagtgggccttatcagatttaatattttttccctgcagcccaaacacaatcagaaaatttccgacacagaaacaagagttgaaagtaaatatagtctccagtgtccgcaacaaagaactctccatcatgtggttgcctgggatgtggcttaattctcatgtgggcttctgagctcagaaaatgggggaaagggatcatttactgagatcatttggttcatctcccagcccccaagccattctaatccagagagaaccgagtgctattctggtctttatgaatgacaaagaaggaagctccctagctacatgttgcagtgtttcacagtctgggagaggaagccgttttttctgcccagcctgaatccatcctgcagcagttggcacagcgaggcacctgtggtttattcatcatcactcttccttcctaagatactcagagttggcaagaaacatgtcatccttggtatccgcaaggacgaacatttctgatgtcctctttagttactgaaagtgtctgtgacttgccagatctttgatgctcctgtcaccccgctgccactccccagggaaagctgggacccaggttgggctctgcctatgatctatagctctttccagcctcctctccaacccaacccctactcccaatctgtcacctcccatggatgccactgatctggctgaaggacaagagaattagattcataatgagctgctggtgtctgaaacctgccagcactgccctgggctatcagttgagccaaaggaagaaggaacagtctgggtttgatcgaagggctaaagcttcaaacagcctctaagtctcagtaggaaaatgtgtaggtttgggagggtgtatgtgtttccgaatgagttcccctaagaactgcttatggttctatatgtgtgttctgtttgtccctgtgtcttttggtgtgtctttttctgcgtgtgtgtgtgcatgtgtgtgtgtctatgcccccgtttggattgccatatttgtggctatcattatgagtgacttaatgagtgtatatgcattggtgtttctgtgactttgtggttttgatgcatgggctggcctcttcataaccatgtccatgcagctggtctggcctagagtacctgccttcaattcactagctccttcttggccatcaagactctgctcaaatgtcacctgctccagggagccttcacctggttgaattagatgccccttatctgtgctcacataacatcctatcaaagcgccctgtttctttccctgacttgatcctctgtcccctattgcctgacctctgtgtgcccagcactcagcccactgcctgacacccaggagatgcacgggaaatggttctgcaaagaaggaataatgcagcaattactatatattgagtgcttacacttactgttttttcacatgcactgttacattgacttctcataacaactctctgaagtcccttcatagcctcaccttacagatgaggaaactgaagctaagagaggttgaggaacttacctaaggacacagtggctaatatatgatgagtcaggacctctaagtccaggctcttaaccaccgtgtcaaacagtcttgtatgaatgggtaggtgtgttggtctctgggtggccaaagataattttattctttacccagggcctcccggggctgggacctacggacaactcaccttttgacacctgccaaaataggaaacaagagtccaagtgatcccctctcctttaagcaccagagaacatgtgaaggggacctttccaatcatacctctggcctggcagagacaatggggctccaaactgtagagtcgggagtgctgggttttagtcctacctctgcagctaactcatttattctcctcagcagtcacattctgcaagcctcaaatgcaaaatgtgtaataacttctgtagaaagtacatgggggcatgaagatcattggcttgattgcttttaaaaaatcggtattgagcactactggggaaatccctggaaacaaacacaattcttccctgagagcttgtgaaaatgcaagactagggcctatgattttccaaagcattttcttccaccaagtgtcaggttgtaggtccttggtcttttctctcttgccttggtacctgcagggtgctgaccagtgctatcatatcccctccccgtttcctaggaccctcttctcggtagactccaacagggcctgccttccttgggcagcatggcaggcctcttggctagtctagtacccacttcttttttttttttttttttttttggatggagcctcactctgtctcccaggctggagtgcactggcgcaatcttagctcactgcaacctctgcctcctgggttcaagcaattctcctggcccagcctcccaagtagctgggattacaggcatgcatcaccatgtccagctatttttttgtatttttagtagaaacagggtttcagcatgttggccaggctggtctcaaactcccgacctcaggtgatctgcctacttcagcctcccaaaatgctggaattacaggcatgacccaccacgcctagtcaggtacccacttcttaactgaaacttagctattccaggttctatcccttttaaaccaactctttgaagagaggtctaataatgacccaatgacttatagctgcagtgagatttttattttaacaggtcacaaaattctcaatccacaaaagtagatttctgaccctaggttattttgttgggggcggagagaggaagtcaaaggttttgcagcctttagagctgcaaaaccagaatttgttgttttgttaaaaatgcacaaataccgacgagtatatttaagtaacacccatagtctaacgaacaaacatgatcagttggcttttccagccctcattctccagcctgtgtgttttctgctcattgtaacacagcgtgtgtgtggcattccatgtttctccagagctttcatgagaatcagtggtcttggatgcatagtgttcccatgagtaccttaattacctaaccattccctgtggttggaaatttatatgggtttttgcattctccttctgctctgaccccaaaataaatgtctgtgttcatacagctattaccttatgtgaaattattttctttgggataaattctcatgatgtgttgttgctttaaaatagtggactccagtctccagagctgcgtctctgcagaggacagtgggacagaagaatcccagggcatgttaaaaaggaccgggtcttcctaaacccacatgcctatatttctgacccagtaccagccaggggggcaagtttccatcccccacaagtcacaaacctgtaactgacactaggatgcttaaggtcaaaggcctggacgaggcctagacagtgggtctggggtagtgtttttgacatcactcaggttcatgttcacatgttgtccccttaccagcatgtgaccttgggccagccactaaccctactgaaactcctttttttcatgtatgaaatggggctaataatggtaccctcctcattagggtattgtgaggatagagttttgcacctgataaatattgtctcctgccccttcctcccctggaaattcaggtctctccctgcagcctaattttaaggcccatttttctgcttccagcccacccctgcccttctaccttcgacctcctccctctgcctctccctctggtgcactggcaaatgggacagagagcctcggtagggccttcctcttagagtcttgcacgcatccctcagtggtctccctgtggctgcttcctgctgccaccaacagatacagacccctgtcgcacagatcatggtagagacagtggtgagcaggaccagacagctccagggagcagtgagggctggcttagagaacctctgttaaactgagaggccaccatcaggaagctctgatccaagatccaggaatccctgactctagggaaaggcctccaatgagagcctgggccctctctgcctgattctgattgtggatgtgccctcaaactccttctcatcactttgttccatccctctttaccctgcagcagctcccacaccctgccaaacaggatgcacagtccagggcagtgtctgagaaagagcagagatctgtcttcatggaaatattgatgtggctctgctggggagcaatggatttatcaagatcaaagttttcctgggagttattgatgcttaatttggaaatagacacactgttgatccctggtatctttagcaacaaagttaaaatgtttgtttttcttcactggttgccatctgagatcttgccggaagtacacaagagaaccttaaatttaacaggaggccctgggagcccatgaggctggcgggcttgggtctgaaatcttttcagtctcttgtaagtgatgagctctcattctctcctgagagctctacggtgccatgttttccactggccttttctgctcagtaattgctacattacaggctgttggtaagttcggaacaagggagctgctgattccatttctgtagcagagaacatgcaccgtgagacttgttgtaccagttcaggttttaggtgctctatttattcttgccccattcagaatgctctcccctgggtctgtggccacaatgctaagagtcatatttatgggcctgcagttgtaattgggccccattctgttcccccaagtggaaagatgaacagggtgtaagcaaccttccctgtagttagaaaaacgtttagttggatttatcagtctgatttttcactcataaacaattgcacaagcctttgcaagcccagagggtcttgtaataatgatggccgtggtccattatggcacagtgatgtgttctacggtggtcattttgctggcaatgacagtcacctctgaacttctctttccaacagacacaatttctcggggtttactttgtctcatcccaagagttccttgccaatgcctacgtcttagctgtgcttctgttccttgccctcctactgcaaaggacatttctgcaagcatcctactatgtggccattgaaactggaattaacttgagaggagcaatacaggtacttggatgattattttttcactttgccataagaaccattattaggaataatgtccatgagtgttattcatcctcatggacactcaagaataattctgctgtaaatttattttttgttgcccattaacgatgttttaaaacagtaaccattgacaaggcagtgtgggatagtggaaaatatcttgggctgaacttgggagacagtgtagctctggctctggttctgccttggactgggtctgaaaatccagctgctcagcccttggcttgaaagtggtagacgtcactaattgatcacagcactctttctgaccaagggtaaatgcaaccttggaatcctctctaagtggctgttccagagttctgctaccagacagtcttctttgggtgtgaaaaaaggaatgtgcttgacatacaaggtctagatagcctctaagacagggtcccctctaagatggggtattggtccatggcctgttaggaactgagccacacatcaggaggtaagcagtgggagcaagcattactacctgagctctgcctcctgtcagatcagcggctacattagactctcataggagtgcgaaccctattgtgaactgtgcaggcaagggtctaggttgtgtgttccttatgagaatctaatgcctgatgatctgaagtggaacagtttcatcctgaaaccatccctctcccccaggtccatggaaaaattgtcttccacgaaaccagtccctggtgccaaaaaggttgaggaccactgctctaagttctatttgaacccttaagtcttgctcactaatgagagtgacctatttggtctgttgggtcacttaagtctaggctcttggtcctgccttctgtgatttccttcttagagtttctggaaagatgatcaaagccagggagtgttcagggcccctctgaagaaggtgatgatgagagttgtccaagtcccagggtcttcactaggattttggttcagctatcagactagagagacatcctgattgagagtagtttaaatgggatagaagtttgtttattcttcagatagagtcagggctgacacaggagctactcaatgatcagagacctggcttcttctgtcatgttgctctgccagccttcttttgtgacttttgtctccatagccatggtgggtattgaaactgccactatatttacatttaaactagccagaagaagggacaagaggagggaacgcattttccttttaaaatggtaatacctgatttgcacataccctctcgcatcccattggtgagaaagtggccaaatggccgtatctagagagtctagaaagagcttggtctttattcttgacagctatatatgcactgctagaaattctctgtgcaaagaggagaatgggcattgggaataactagatgcagctatgcctagtgatgtccatgaagttgtggtaaaatcctgaagctaccttgttctttggaaatgttcctcagaatcattaacattagtcatgtgggagacaggagaagaagctctgcagaaaagggaccgagaggacaaggatatagcttgggctggggacaatgtcagagtccaaactctggctatcttggaatagtctgtgtgaacggtgccctcccaagttgtgcagtgcacaacctgtgcagctatatatggcaaccctgcccatccccagtggtttctcactgggaaagcagagtatttcctcagggatgtcattatgtgacaatagtggaaaaagcccaggaaaatctaagaccttctaagactcatgggggcccagagctgggaggaaccaagctgttgctcagttcagaaaacttctctagaaatcccagcctctcctcacacccctccagtgacaggcagacttgcaccaccacaagcaacagccacttttgtggttgggcagttttgtaattaaatatactaatgtgtgtatgtcataaattacattttccaattatgccaaaagagccaaaaatggttttttaatggttagcatataatcgtttttatcaaattgcttgaatctttcatgttaataagagagattcattactatgccacaaaaagcaaatactggcattaattatagaaacaaattaggggggtggagcgcaatggctcatgactgtaatcccagcgctttgggaggctgaggcgggtggatcacaaggtcagaagtttgagaccagcctgaccaacatagtgaaaccccatctctactaaaaatacaaaaattagccaggcatgttggcgtgcacctgtagtcccagctactcaggaggctgaggcaggagaatcgcttgaacccagcaggtggaggttgcagtgagctgagatcgtgccactatactccagcttgggcgacagagtgagacttcatctcaaaaaaaaaaaaaaaaaaaaagtggctcatgcctgtaatcccagcactttgggaggccaaggcgggtggatcacaaggtcaggagatcgagaccatcctggctaacatggtgaaaccccgtctctactaaaaatacaaaaaaaaattagccaggcatggtggcgggtgcctgtagtcccagctactcgggaggctgaggcaggagaatggcgtgaacccaggaggaggagcttgcagtgagccgagatggcaccaccgcactccagcctgggcgacacagcaagactctgaaaaaaaaaaaaaggaaagaaagaaggaaaggaaaggaaagaaaggaaaggaaaggaaggaaagaaagaaagaaaggaaagagagagagagaaagaaagaaagaaagaaagaaagaaagaaagaaagaaagaaagaaagaaagaaagaaagaaagagaaagaaagaaagaaaaagaaaagaaaggagttagggagaaaaaaaccctttctttctttcttttggagatttccggaaaatgtacccttacggatgagagcctgtgtcttcatgggttagagaataaccacgctttgtgcataaaaagttattaagcacaattcctgaattatacataattactagctgtcagtcagttgtgcatttctgtgtatgctggtcttcacttaataagactttatttcacagatcacttggtgtccctacttcactgaaactaggtgattatcttttgaagtctcatttcacataacctaggaggtatatagatttctttaaaaatgtcattgccattattttaaaccttacccatggtatatataaacttacagaaagacagaataggttcattattttaaaccttgcccatggtgtatattagctcacagaaagacatagaataggttcctgccttaagaaaacctgacccacaaaaaagcctgggtttacacaaaagaggaattaagggcggggagcccaccttacaacagaatgaataatagaattttatccaagagcaggcatcctgaggacatttaagacccggatgcatttttccttgttcaagagcacacatccaaaaattgcagtctttctgcgagtcatgatcactctgcacataaagcgtttaggttcagagctcggggaggccattaccatggctgctctctgtctgccctgtgagggtccttggggtggctgcactctggggatggtgctggggctgactgactcacgcggtcgtgtaacacatcagaccttccaaagtcgaacccttgttttgtttcaaggctcaattatgacaggacttggtctcagagcagatcccctccctaggctggagaaggccactttaaaacagatggcctgccccacttcatcatttttatggctctgatctgtgttctccactggcctctggtaaatcaagaatacaagtggacatgaagatctgctttaaaaaataaagaacagaccgggtgcggtggctcatgcctgtaatctcagcatttggaggccgaggtggatggatctcctgaggtcaggagtttgagaccagcctggccaacatggcaaaaccccatctctgctaaaaatataaaaattagctgggcatggtaggcacgtgcctataattccagctactccggaggctgaggcatgagaattgcttgaacccggaaggtggaggctgcagtgagctgagatcatgccacttcactccagcctgggaagcagagcgagactctgtctctaaataaataagtaaatgaattaaattaaataaaaataaagaaccaattaagtcctgtctacaggaaaaggccttacttgctggagaagtagcttgctgtgctggagtagactagtaagttggaacggtgatacagtaccaccttacagagctgctctagggcaccatggggactgtctgagaagcccctggcacactgtaacaggtggcatctggtgtggtgatgatgatgagaatgatgatgaatgtgaaacactctgctctcatttctagaccaagatttacaataaaattatgcacctgtccacctccaacctgtccatgggagaaatgactgctggacagatctgtaatctggttgccatcgacaccaatcagctcatgtggtttttcttcttgtgcccaaacctctgggctatgccagtacaggtactagatgggctgaggggaagggaggggggcagcaggacacacaaccagaatctgctggtccatggccagtaactaggagcacaccgtcttccactccatgcttgcctgtacctttcacacacttggctataccacaggctgtacctctgggtccctcctgtcccatactctgcaagcactgaccatctctcttaatgaccagagaaggcagtatcattaagactttaaaaatggagccaactttataaactatagaaaaatcaagccaggttcaggggctcacacctgtaatcccagcactttgggaggctgaggcaggaagattacatgagcacaggagttcaagactggcctgggcaacacagtgagaccccttctatgcagaaaaaaaaaagaagaaagaaaagaaaaatcgtacatggaatgcccacagatcttaaaagctatgttgtagcaaaatatttaattacatcaaaaagtgttagtgatgtatttttaagcaaaaagagtaagttacaaatagtatatgttgtatgcttactactaaactggaatatatgttatgtatacatttgtacagattcacacatgaaaaagaattggaaaatcacatagtgggattataagtgatttttattttctttatgtgtttctaaattctctaataagcgtgtataagatttggaaatcaacaacatgatacttttagcctaggcaacaaagtgagaccctgtctgtacaaaaaattagctggaagtggtggctcacaactatagccccagctactcagaggctgaggtgggaagattacctaaagtccaggaggcagaggttgcagtgagctacaatcacaccactgcactccagcctgggcgatagagtgacaccttgtctcaaaaacaaacaaaacctggtgttttttagccagatgtggtggtgcgcccctttagtcccagctacctgggagtctgagatggaaggattgcttgaccccaggagttcaaggctgcagtgagcaatgatcacgcccctgcacttcagcctggacaacagagagactcctgtctcttaaaaaataaaaataaaaacgttaaaacatggtatttttttaaagcaagacaacctttggtgctggctcaggaagaggtacattaccccccaataatcagaggagaatcgtcagcatgattgatctgacctcgggcttcatgtgtcccatctcccacccggagctcttccaccacagagtctgatcctgtcctatgcctgggactaaatcttcaccctggtgttcaggccagaaaccgaaatcccagacccattcccagagggcgggaaggttccaccgggagagcttgatgtagcagaaagtgacttgggtgagacaggctgattcaaatacttaacctctctgagccttggtttctttatctatgaaatggggaggctgcccaccctctggagttgctatggcaattcagttagataatgtaagtaacacagcaggcagagtggcccccagagtcttcacttcgtaaatatcagatccctctaccttgcacatgtttggtatgagtgaggtgttaccaatccagaatccattgcttcttgggataaagattccataaaccttcatctccagtgatttgtattggtcctccttacttgtaaagcttagagtttaaaaatattaaaagaaaaaaaggggagaggctcccacagggacacagctagacaagatgagatgcagggaatctgatgttcttttttatgggaacagtcatatatgccatcccccattaccacctacccatgcccagactgcccccgctccattctgccaagacagatcaatgactataaaagctacaaaagggcctggagatctcatctagtttagttaccaaccaaccttttatgcacaagactttctaagctgggtgtggtggctcatgcctgtagtctcagccactcaaaaggctgaggtaggaggatggcttgagcccaagagttcgagtccagcctgggcaacatagagagacctcatctctaacacaattttttttttgaaacatgaaaaatgaagatttctgaccatgcttctctcattagttaacactttgggctgtgagggtctgatgcagagagacacagcctgggaggatcctaacatgtacacagcattcaaaaggctacaagacactttctgttgtgtccccttgaacaagcagtttgtaagattttgttggccaggcatggtggctcgctcctgtaatcccagcactttgggaggctgaggctgatggttcacctgaggtcaggagttcgagaccagcctgaccaatatggtgaaaccccgtctctactaaaaatacaaaaattagccgggcatgatggcgtgtgcctgtagtctcagctactccggaggctgagacaggagaattgcttgagcccaggaggcggagactgtggtgagctgagatcgtgtcactgcgttccagcctgggtaacagagcgagactcggtctaaaaaaaaaaaaaaaaaagaaatcaggttttgtctactaaacctgctgcacggttaccgttactagtactcacagggtttgttgcacatgcatcgttgctaatagtgctaactaatattaacagcccttgccctatgcctggccctgtcccagcccccctcccttgtataatttaacccttgcactgggggtagagattttcatatctactgatttcttacctttgctcatttatcatggagtgtcctttggttttctgtgtttgtatatacctttaccacttatagatttgaccagcactcaagaaccagtgttactcctgggagttaatacaatcccagccccatggcaaagaaactcatgtggttaggattctgtgtgcagcctggttagccacagggcacgtaaggctttttataatattgacatgagtgcagaagccccattcccgtgtaagccctgagggctcttgtttcataatctttttttggtcacatgcacacagctttattgagatataacccactcatttaaagcatacaaatcagtgggttttagtgtcctatattcacagagctgtgcagccatcatcacaaatgtggaagttttcatttccccaaaaagaaacccgtacccattggcagtcactcctcatcttcgcccccagcccttggccaccgtttatctacacatacttttgaaaggctagtgaaactttctcagaaaaataaatgcttgctcaaacatttgggctataatttcaggggcttcatgggtgcccccctgacatttatcaagaacaccaggttaaggaatttagctataatggaggcctctgtgtttcccagtctcctgggtatcagaggcccagagagggcaggtgccttaccctgggccacgcagtgaaccagtggcagcaccatactcacacatctcctttctgcggttccccagtgacagagttctcaggaagctttttcatttattttctgagaggagggtaggccatcttgtattgatctccaactatatgccagccacaattctaggtgcttatcataaaggttcatttaatcttcacaatagtcctgcagagtggacagagtccttcagagtgggcattataatcaccattttaaagatggagaagctgaaaaccagagaggttaagtaactcacccaagactgcacagcaaaaggctggggctttgaaactcagggccacagactccaaagactatgtcctccccactatgctagatttttttcctaacctgtgaataggagacaaaatagtccttttatttctcacagttgctttgcacactcagaatccatgatttcttctgcatgagggccattcagacctgtgcagaagagagtaatggaccaaggagtcttgggagcacctaggaggaggggatgggggagcatgaggaggagccagggaacagcagcagctgcagcaccagctcccaccccagcctctgccagtctcttggaggtggtgtgggtgcagacaccggctcacaaggtgccctgttagtgagcttggggtgccatgggagccttcttgttgtcaggcccaacccaagctggctgaagaacaccctgatggcctccatttgagcacaactaatgaaggactggatgccagagataagtccaggagggtgatgctgcagggcaggccagggaagagggtacttcatctctatcatggtcctctgcccatccatgccagcatctaacacctgttaaacactgggaggcaggtggtgaaggggccacttcccagcctctaagatacctcctaagccaggaggcattctgtgattaaattacagggcctcccacttactcctttatccttgaggcggtgctggaagcttaatgccaatctggtgtagggctctgggactacaggaccaaggcaagcagtcctttctctctctctctctctttttagctaaggaagccagcacatctgttctttgagaaaaagccctgtatttagaggtgtctgcctttgaaggcaacctgagaaactgtcatcttggcgctttggggactggccatttacacttctcataaatattcagaagtaggcagtcatttacataaagctaaatgcagaaggaattctcttttcagggaatacctggcagattcattaaaaaaattaaagaaaccaagagcataagaatgaaaagcgaattctcggaccccaggctggttttttctggcatgggtgcagtaactttgcctctttgctcagttatcacttttttccaatgacagtaaccataagccctgagagccagcaaatagaacaaaaggtgctgtcacaaacattgtgcaatctcatctctgagatttccatctggaaaatagactggagagagttaaggcttcaaccagccttgcagataaatgcagttagttaccagcccagcaaccctctgcttgcatgagagcccattatgctaacctccttttgaaattgctttgtttctcctccttccctgcactccactccccaagataatttggaaacctgggcaccaaggcttgtcccactctaggggactggggaaacagggattttgccagcacctcctggcagggcaaccatcaggtcaaagggacctgacccatgaccccttcctcagatcattgtgggtgtgattctcctctactacatactcggagtcagtgccttaattggagcagctgtcatcattctactggctcctgtccagtacttcgtggccaccaagctgtctcaggcccagcggagcacactggtgagtgcccaaaggtgtgtgtgttttgtccctcttcccctccttccctcgacagcagcaggtctcctcccacacacccacactgtcattgactttgactttgactttgagtaggccacttcacctgtccaggcctcagcttctttgtctgggaaatggagtcaatgggggaggaggctgcctcccggtgaggacaggaggcgggcatggcagtgacagtattgacactcaggccttcctctcgggtgggagacggagcagaagcctctcccctctgactcggggacccctgcaggagtattccaatgagcggctgaagcagaccaacgagatgctccgcggcatcaagctgctgaagctgtacgcctgggagaacatcttccgcacgcgggtggagacgacccgcaggaaggagatgaccagcctcagggcctttgccatctatacctccatctccagtgagttcaccccacacagccagccctgggtgctgctgcgtacatgcaaggagagggtgtcagagctcgggtaagagggggtgcagggacagaagcaggaggccttgagattatccgactcagtaggggagcctcaaactggctctgatagctaagctcccagaaatcaaagtactcttcattcatttatccaacaaacatgcatggaaagcctgctatgtgctggacactgtgctggccctcaggatacagtgatgaggaagagagatgaagtttcattcctcatggaactgatatgttattgacagacagcagcaagtaagtaaatgaccacagttttgaactctcctaagaatgaagactttttagtaagtcagactgagctgtcattgccctggggaagctacaagaaagcttccatccacttggggctatgcaaaagaaaaagactagttatccttaaatatcagaagcccaggctgaaggtactcacaggtgtagggactgaatttatattaaccaagtagtttgggaaccccaagccaaggaagaagaaaaagaccaaaactggtaaaagtcctagagtcccatatacttgaaaccattttactgagaatgtaaaacttttttttctttttttgagatggagtctcgctctgtcacccaggctggagtgcagtggcaaaatctcggctcactgcaacctccacatcccaggttcaagtgattctcctgcctcagcctcccatgtagctgggactacaggcacacaccaccacacccgactaatttttgtatttttagtagagacagagtttcaccatattggccaggctagtcttgaactcctgacctcgtgatccacccgcctcagcctcccaaagtgctggaattacatgcatgagccactgtgcccagcccaaaagattttttagaaattgaaattttagttatggaaattaattcagtgaacaatggtcccctggtcagagtgagggcttacggaggtcaggtgatccatggagtcctggcccaagtttatctcacagttggtctcgtggctccgtggacccatcccatggtggttacttcccaagtgcataattgggatgtagatatttagcaaccagctgacttcacactagttccctgacctgtccagtctaagagtcattatggccaagtggaagcccctggaaagaagaaaacaaaaaagaaaccaaaacttactcagtgcacaggttacatgaatgagtatagctgaagagagaatttttgaattagaagacagatgagtggggattacacagaacgtggcaaggagagtaagttggtagaaccattttacagatgggaaattaaggccagaggggagtgtgttcctgagatccctcctgaggttagtagcatggctcggactagatcctccaaagtctcttaactcctggtctcaggctattttccacaaagagctgggggcctctgtggggtgaagaagacttaggacaccatggggcaccattatgaggccatttcctcctaggagaaaaaaaatctctgggctctgaaaggagtagaattagggtaggaaattaagagaggctaccgaccacctcctccaactaaaattggttcttttggtgccaggaagagacacacctggtgggggagggaaggtggtaatggagggggtgctggtagtgtctcccagatagacccatccaacaagtctcatggagaatgagacggtcactcaggtcatctgcgtattcttggcattcttgctgcctagagagagagtctgatggagctaggtggccaccaagctgtcccactccccaagacagtttggaaacatgggcaccaaggcatgtccctgtctaggggactggggaaatatcccatagcagtgttctcacagtatggggctggccatgaataccccaggagtccaacctccctttgtccagctagaccatggtgtcctatgcctcaggcagggaatgtggtccagtcatcagtggctgggccgtctgccatacatggtgcaagccatggcgttttatgcagaaagtcctgctagcatttgattttctcagaatggagctgtgagcatggcaggcaaccactgtttcctggattcttcaccaagacaccccaagttcctggtctctccccgttatcctcatccctgaccctgtggttctcagagcctccaaacacactcaggctaagcactccatagacaggggaaatttggaaggaacatctagggagctcagaaaagccaatgtccctagccccaggcccacttcaaccttctctctgtcagtcctgcctgcccctggaggctggttacatgaagagtaaccccctgcttgtgtatagccccccagttttgtacaggtttagagacagttcccagcagtaggaacagctgccgaggtgggagagggcttctcccgatagccgggggacttcctctcccaggaacaacagggtggggtagagcaggcttgtcgttgctgagatagagagagggaagggaaacaacaaggaaagtgggggcactgggtccccaaggttcctggcacagcaagcagtgaagttggggcagcctcaggtcatgtagtgggggcaggtgacatctgctttgactgctcctaagagatatgtactcatctcctggattccaaactgcagcctgggacatgttttcttatataaacagcatcaaaagatgtgtgagttcccaggctagcccactgaaccctacctagtgggtgctcattgtcccccagagcccccagaagacaagccgtggctttgtgatgggcctggggccaggaggacctagggatatgttgtgaagagctgagaagactctggaaaaaaggggctctggagccaagcaggagcccgcccaggactcctcacgtgtccaagtcacctagggagagaaacagagcagcccaggttggtccctggaagagagcagcggaggaggggaaaggggagagcccctggggagagctttgaaagtcaagtgctgtttgctcagtgtgtttgcctttccgaggatgtgtttttttttccctccgttagtcagcagtgggagggggagagagacgggtggtagggtgcagggtacctcctggctgcaggcatatgctttgagtgcgtgttcatttacctcctctggacttcctgccttctgttaccagggatcaagacacaggtcattaggcgtgaggtaatggggcatctcttgttctgacccctggcgccagtcttggagtcctgacgctgcagaggagccccagagtcacatttcctgttggggcccatcctgctcatatgcggcaccatcagacttctgggcaggcaagattacctgtgactctgtctgatggtctcgccatcaatatcactgagagtagctgtgtatggagtcccgaactggtacaggataaaacagggggctgaaaagggaatgaatgggcacagtttctctggcatcaaaagtcacatccagaattgatatttcctgttgagtaaaaatagaaatataagttgctcagtggatgttgagtgagccctattcatgtgccccactctgtgccaagcaccaggaaggagggaagggaaaaatgataagatgttctccccgttctccaggagtttatgctccactaagaagtcagagctaacatgcacagaacagtgtggcagcgagagcagaaccgtgtggccagctccatgcttgccgcctagcaagcgtgattgcacttcatcctcataacaacttggtgaggtgtgttgctctgttgtcccattttacagcagagaggactgactctcagtgaattgaaatgtctcagtgaggtcttccacagcaaaaggcgaagcacagagaaggaagtccatgtgggctgggagttcacccagagattcatgtaggggcaatgtgggctgtaccttgcaagatggtgggatttcaatgaggagaagacaaagtgggaggaagctggagacaaggactgtggtctcttcctttagaagtcagttcaatctttttttccttgtggaagcagcataactctaggtggttcctctgtatctgaggacaagctttgtagaggtgacaaaggggtcctaggtcctatcaggcaagcactcgatatgctgccagttcattctgtccattgtgagatacccattccagagcgcttcctctgtgccaggctctacggaggttctggatgttaaagaggaagcaggcatggccctggccctcccagtcttgtgggagattgatcatgcccatgaatagtgaccatgtggtcagagccacagggtcaattccaaatgcccctgtttctcttttgtgttactcacctgactctgggtctttcgtttcttccattcattttttttaaacaaatatttcctgcccaccttctgtgtgccaggcctggggatgcagtgggagaagcctctgtcctcctcagtggaggcgctaactcagaacaggcagtggagaaaaacaacatgacctggagacctggtgccccttccttccccagcatctttgaaattcttttggttgttgttgttttgagatggagtctcactctgttgtcaggctggagtgcagtggcgcgatctcaactcactgcaacctctgcctcccaggttcaagtaattctccctgcctcagcctcccaagtagctgggattacaggtgctctctaccatgcccagtaatattttttgtatttttagtagagacagggtttcgccatgttggccagcctggtctcaaactcctgacctcaggtgatccacctgccttggcctcccaaaatgctgggattacaagcatgagccactgtgcctggcctgaaattcttcaatatctacctgcccttctgccagttggtgcagccacagtgggctgcttatgcatatcctggcctggcttggtggggagcatggctgagggagagccggggcacccatcaattaaggaggtaaagatcagtctgactgagatgcctcctgccacacttcctcagctgccagcaactgacaccattaacctgatttccttccccctctgttgactgcactgactattggactgaatgggaaacagccccgtgcacctcaaaatgcacttcccctcctgcagatgcatcttgcaattaggcccaaactgtgagcctgcatgctcctcccctggccctgcacaggcaacaaagctgaagttaatcagaggtacaaatggctggctatgcctctctgacacgtaacttctggaacatgtatcaatgctttggaaatgaaaagctcctggtattgcaatgccaggctggtgcccataagggccagaaaacattccttgggcaaagccagggggagtgggtgatctgatcccagctcaggtttgttgatttgttgttttgtttgtttcgttttgtatggggcaagggttgagggtatgaaaaacttacactatcatttactaccgtagtccccagaacccagcacaccagcacaaggcctggaacagggataccttttttgaatgaataagtctttttttttttttttttttttttttttgagacagagtttcactcttgttgcccaggctggagtgcagtggcgcgatctcggctcactgcaacctccgcctcctgggttcaagcgattctcctgcctcagcctctcgagtagctaggattacaggtatgcgccaccacgcctggctaatattttggtatttttagtagagatggggtttcaccatgttggccaggctggtctcaaactcctgacctcaggtgatccacccaccttggcctcccagagtgctgggattacaggcgtgagccactgtgcccagccttgaatggataagtcttaagggatatttttggaaaggatattctaaaaaatacccatgtctctacactattgcagaagggctttcagttttgatggcagcctttcaggccagcctacacgcaactaaacttttccataacagcatcacacttacacaagaagaaggttttataatccacttgccattatttaacatagttcttcctccttaactttcaagatctgagcactataatgttcttctttttgtttttgtttttttctaaatcaaattaaggtgagtcacctcaccttgggcctgagttggacagaaatctattcttggctatattccccacccctccaccaccttggaaccttatagaactttatgtggttcaggaaaatgagggcgaggcctcagatcttcaacccatgacagctgtatgcccagctccctgccttcctgtcttacccccagctagggcacaggactgactattgtgcccagagaggtgccagagcctgtaacaaccccagacttcccaggtccagccacatccaccccagagccccaaaagatgatcttcagagagacctttaaaacacaagtagctggtcacttccatccagaccagaacccaagatggctgtgctcttgctgagacatgttggttgtcattgcctccgagcccactttagccctcagctctgtaccagaaatgctgttcctttgggaatcacagccaaagaagagatggagcagttctggaataagaacacaagttcaaactgtcccatatctccccacatcactatctacagttggtctcttcccatggcgatgtccatctgccaccgtggcactggtattgctttgagtgcaggggtctctctttttggcatgttggccctgttactccctgggaactttgagtcttatttggaatgcgtgaagtccctgtgtccggggccagcactgatccacacagctaagtttgcactcatcttccctctcatgtatcatatctggaatggggtctgacacttgatgtgggacctaggaaaaggcctgaagattccccagctataccaatctggagtggttgtcccggttcttactgtactgtcctctgtagggctggcagccatgtgaagaacagaggttcccagcatcatcttcctacacattattacattcacccatctttctgtttctcacttttatctccagcctgggaaaagttctccttatttgtttaaatccttttgtgcttttagatccccttggagcagtagagtaccttgtagaccataagagtggaaaagggtctagttttctccttgtttctaaagatggggtggctgaaaaaactccccttttttgcctacagcttgcctctctgggcctagaagtggttattctgtctccatattggcctttgatttgtgctgagggtcagcttttggctccttcttcctgagacagtggaaacaatgccagctgtgtggcttctgccctgggggctgggggtgaggctttgggtgccactgcctgtgggttgctggcttaaaggacaattctgttcattggtgagagcccaggccattaacacctacgcagtgttattgaaagaagagaggcgggggtggaggggaattagtctatcccagctagagggagataaagagggctagttagttcttggagcagctgctttgaggagaaaatgtatagcttttgacacaacaggaagatccagaaaattatcattgaacatattaaaggttatttctttttcttgcaaaacacacacacacacacacacacacacacacacacgcgaacacacgcagctgatgattctactctcccagccccagccctgaaggggacccagaactccctgcacaaaggctgtccttcaaggggagggtgaaagaagtggaaaatcacattttcattctttagcgtctccatacaacagccagaactgggcagaagctaattatatcagaagcatactccatgttgctgcatcagctttgggatgttcatttttaaatttatttatagcttgtctcattcctcaaaggagttcagggagctacaaaaataaagacaataaaattgaaaaaaattaaattaaaaaaaccatgaccagggaaaatgtgcagtagaatgaagtgtcaattatcacgttttctgactgcaaaatctcccccacggctgatgcaccatcatttactacaacagcccctcttgttggacatttccagtttatttcgtttgggatggtttgttgctgttgctgtggttgtggttttgttttattgaattttgtgttagctgcagctaataccatcttgctgatggctttgcgctgctcttgaatgattactcaggataaatttcctggagacggattataggatcagaaggtctgaacttctgtgtggctctagctacaaagcaccagattgctttccaagagcgttgtagcaatttataatccaacactcagcctattttttggctgggagtcaagccccagaatgtgaaggaggggtcttggcctggagcaggggctgagggatgggtgcacaggacccctccttattggttatttatggggatgggccaggaggagcagaatagaggcccctgccctcccagttgctccttggagtgactgaccccataggggaggggcgaggctacctcacatttagaactatgtagttggtgatggtcaaggtcctaggtctgatgggcatcctcctccctctcctcctcagccagtaatggctgcactatgtcgtatgtcctagatctgggtcccttttgctgtgggaacaccaataatacttacgctgtttcctgccggaaacggtgcaggagggctgtggcatggtagtgggccctggaaaccatctagccttcatgaggaagggcagttaaagcacaggcatgtatgatgttggtattgattaaaagcctcacgggcagagaaattcgccatctgccagggccccagccatacgagggctccagccatacatcctccaggagactgggacctctccaattgcaggagccttgccttccccatcagattaggaattccccgaggatggggacaatgtccttcccacctgcttgagaactcctaaggggcatgtactctgtctccccattgtatctggaacttcctgggagcatagctcctgtctccgtcctcagactgggaatcccctaagggcagaggccatgtccttccacccacttgggattccctgaagttggggaccacatctctgatgtacaatgctttgtatgtactgactgctgcaggattcttggagtaaatgggcagtcaacttcttggactggtattgaccatctggacttcatcagagtgtccaagactttgccattcattagacaggggccatgtgcacaggcagagccctggcctctggcttctggctcctgactcctggtccctctgctttaatttggctaatggcagaaccagactcctttctgggctgccctggaaggggatccttgaatgaaagaggatagatgggaaggtggcagctgacatggttacctcttatgccatgggggggctgctctctctggaaatttaggcctggggtcagggcactgttgagcattttacaccctaggccagaggaggggtgacctgtggagcagggctaagctagtagcccatgaggtatgatgtgtaggcagcacctggggctcacagagcctgttacccatgttatctcctctgaccttggaaagagctggggtgtatgaacaagtatttataagtttacaaaaatcatatgaggaaactgaggcacggggaaggtaaatgacatgccctaggttacacagcttataagtagcagggattctgcccttctgtcacaccaagtcccactgtcttttcttcctggagtccctgtgactgatctaaaggccacatgtttaacagaataaggaggaggcctctgttgcagcaaaccagctaccccacccgcacacagactctaagggacatcctgctttaagctgtccttagttactaatacctcagtgagaatgagtttgaaattttctcaagagccatgggagactaggaagtctctaagcttcatagagagcctggcttggggggacacaggagccaaaggcagaggaagaagtggcagctttgtgcccccagaaacacgtgctcctgacctcacagttggccacagccagccaactctcccatccttctcccaccactttcccgtggggctaacttcaccctgtccacacggagtgacttaacagtttaagccccagagtcgggggccggggtacctgggacaagagtcctgagggaaatggggtgaggaactggaagtgccacagggctagagttctgcccctagcctactggagctgtgccccacaggctggccccactggactgcgctgcctccaagccatcctgggcatctccatgtgtagctgtcacgctcctcccactaaacgcctccctgtgcttcctctgcagttttcatgaacacggccatccccattgcagctgtcctcatagtaagtggatcctttctccatctcttgggggtagggtggagggggagggcgtctgcagtgacaggctgcccagatttggcctttctgcacaggggcctcagaagacaggctccacagccagactgaaaataggatcgaaagtttatagagggtgtggcccctccccaactccagccgaacaggggcctctgcctccaggcctggaagaccggaggcttagtatttagagaaattaaactttcttttaaaaaatagctatccaaatttttaatttttaaagtgaaacatgtgtattgtagaagtgatgggaaatccagaacagaaagctcaaagagaattaaaatcacccataatcccactggtaacatttttaatgtgtttctttccagtctttttttaaggcctatgatatgtcattttctacaaaaataggaatgtgctatgcatgcagttttgcaacctgctcttttaaatttaggaatatgccacacacaattctccatgccactgaatattatgatggtggctttctaaagcaattttgataaaagctgtgtgtgagctgagccatgggggtcaagcagcatgctcctacagaaaggcctgggcccctacgagcctgcagccccctcacccagcctcccatccccatcttctgtgatggctgcagttccttaaaaagatctgcttatttcccccggggccagtgtccctgagctgtgtagagttcacagcctgtcggatacacttgggaattcacttccaatgtgatgtattgagctggttcctggcctggctcctgggggaactgtgggtaacagaggccactgagccagccaggtggctggggcaaagcactgtgcagtttcgtaatcactctgtttacgttatcccgatgaggactggggagatgagcaccccgcctgctgtctgcagagggggccgtgctgacctaacccgagatctcctccctgcttattcccagccaagactgggcaggacagggagtcttggccaggacagggagggagcagcccctgctctccagcttgaagtcctgaacttgttggggacgtttccatgagatgactgtggggatgatgaaggtgtctccaactaaaagatcctcttaggagcctgctccctgacagccctctcatttcccttccagtgctgagcgtttccagtgtgggagggacccacaccctgggccaccctggcctcacttgtgcctctgtccacagactttcgtgggccacgtcagcttcttcaaagaggccgacttctcgccctccgtggcctttgcctccctctccctcttccatatcttggtcacaccgctgttcctgctgtccagtgtggtccgatctaccgtcaaagctctagtgaggtgaggggagggtccgggcgagggcactgggcaggcaggtcctgtgtcagcctcaaggcttgctcgagtgatggccaaaccacagctgtttggtcccggaacacacccccattgctgggccttgctgtagctggtcctggttggtcagagggacattggcctgtatggtttcccagctcgccatccctgagcaaggacttgcttacatacctcccaggagaggggactcactgtcactttcacgacaacttaaaaaaaaaaaaaaaccagtgttgagccaaatgtggaatcctcctaaattctacccactggtcctaacttcaccctccagagccaccaagaatgaggccatcccgtccccacgtggctgccccatggatatcagaaggcatccactgtgtctatctttcccaggccaagtatcccctaccctttccacagcccctgagccctcacagcctcagccagtgaaacagcttcccccaagcgctgggtcctgctctgattggcccacagctcttggaggctcccacttccaggctctagagcctcatggggactctgccactgtcccagaggcattgccctcttgggaatgaaagcctgaaggtagaaggctgaggctttggctgggaaatgccctgtctggagtgagaagatgtccttgggcctctgaagtagctctgcctccttgaaagcaagagcctgtcatgcctctatggagggctggcttgtccttacccatggccagagaaccagtcagtaacaaatgtcctctgtgtcttcagccttgaggaaggtgacacccctgtctcatgggaccctggcaggtactgggaagctggaaggaaggagtagctgttggaatgaagtagctgatagagagggtagcttgcagggggagactctagcatgggttcaaagatggaatggggcataactcagcaaaattatgctctaaggagtatctgaccaggcagtagctggttaaacagggattagctcccatttccacagtcggctgtgctgactcagtttcttgaccagggtgttgtggggtctgaagatcacccctcctcccaccacccactctccagccctatgattctgtgtagaaaccacagatttaagaacgctgcacctgcctgaaaactgttgcactgatcccaaagcgttcatattttcaaacactctggatcccactgtttccaggaatggaacaccagagtagcagaggccttttcagtgaggcagctcaggctctggctgaaggtgggcgcaggacactacctgaagcttcaccccaagagatgagggccagctccactcttcccagtcaccgcctgtgggggagggaggctggacagggcatgaaggcagagcctggtggtctgcccctcccatctaggggtggcgcacagaaagggagactccaggccacagctcacttacaccccagaataaccttgccttgagggtgggatggcttgtctgccccaggcctgttggacatttagcaaaagagaagaaaggggaatacaaacaatcctgagcttcccagaaagctttcacacctccaggatgggagagaatgaactagaagagtgaagcttccagtgcttcctcaggtccacagggaaatctggacaggggagagggtaggaatagccgcctcccccgtgagtaatgacacctcctccagcaggctgttatggggatccgattacataatgctacaaaacagttaacacagtgtctggcatttagtgtatgctcacaaaatactagctattgattctttaccaatcctagtcctaactaaccttaaccctgaccaatccaacaccaaccatccttcagtctaataacccagactaactaacttcaacattaaccctaaaactaaccaatctcacctccaatccagaccccagcctattccagctgactggtcaaccctagcaaaccctggtaacaccaattacctgcccccatgcccactggtctgcccccttcagtgtgggctttgtgggactatacttcaggcctgagatcctgctcagagctctctatcaggctgcgccctctcccctcccctctgcccctggcaggggtgaggggtgtctctgtgcttcccgagcagcgtgcaaaagctaagcgagttcctgtccagtgcagagatccgtgaggagcagtgtgccccccatgagcccacacctcagggcccagccagcaagtaccaggcggtggtgagtgcccggcctccccttgctactcccagcatggtcctctaaggcccaaaacttgggcctgctgtgtcggacttctgccttttttcccaggaagaggggctcccttccctacacagctcccagcccagtgggtcctcacctccaaaccacccccagcccctcagggttgtgaaccgcaagcgtccagcccgggaggattgtcggggcctcaccggcccactgcagagcctggtccccagtgcagatggcgatgctgacaactgctgtgtccaggtgagtcctgctgccccatgcctggccacccagcaccaactcccagagggagctcagcacctggaaagccagaaagctgcatgcttagtcctctgcagaggtcaccctgcctgcctgtacggtccataggagtccagaaaccagggaccaccaagtggggggacccccagccttaggcaagggtcagcatgagaaggccagtctcccactcccctgctctggaagtgatccaggggctggaatcagtgtcttttggctttcatggaggaggggaagccagagactattcactgggaactggctgcctttctgttctctcctgggcggtgggacacgcctaatgaagatcatgggaggctacttcacgtggaccccagatggaatccccacactgtccaacatcaccattcgtatcccccgaggtatggcccagtccacccctccagcatgcccctccccatgtcccactgaataacatagagataaaaagacaaagctgcatttattgagcacctactctctgctcattcttggtgtatgccctgggtatattatagaaggggaaggctacattctagaggcttccgtgtgctgggtgggagtgaagcactaaggacagggtaaaattgccagccttaatgtcaaaccatccattgcagacagtataggtaatgcacaaaaagatcagaagtgggtagccaaggaacgcaagtggaagtgatggggtttctgagaatggacaaaggccctgaggccatgaggcaggaggattttctggcagaggcagccatgagcaaagtatggaggtgggttggaggtgggacccaggatggtgtttcttgggaccacaaggagcctgggctcatactaggagcatgggaaaggagaagcgagtgcttaggaagggtggcggggcaggaaatcagagagggggaaggacctggggagccagaggaggatgttgatttccagaaggaaaggattaaagagggagaggacttgctggggattctaggtaggaagaaagaaaacaggggccccagggttgggtgcatctgtctgtctgtctttctgggtaatggttgttcagactcccccggccccactcacatctgccaccctccctccctgcaggccagctgactatgatcgtggggcaggtgggctgcggcaagtcctcgctccttctagccgcactgggggagatgcagaaggtctcaggggctgtcttctggagcaggtaatacatgtatcctcagggcccagtggaggggaaatctccttttaaccatcctcctcagttgaggatgcacacacatttattggagggcccactctgtgttcagtgaggactcaataaatgctgctaatggatattctcatcatcatcactagtacgtattcacctcttactatgcgcaggttctttgctaagtcctttgcatgcattatttcatttaatttttatgataactaacaaggtccatactgttctcaattctcatttatagaggaaggttaaactatttgtcctaattcacacagctaataagtggcagagctggaattgaaactcagttctgtcagactctgaatcccatggttactcagatgcacggcagtaatttcccagtgtgggaaattgcaacaccaacattggtttccagcttggtcctgagctgcactgacctacacaccataagtgggtgttctgaagatccagatgtaaccaataaatgttggtttctgggcaaagatcactgtcttaattaaagagccagaaccccaggctcagtcaatcacgaatctgttatttatacccacctacttccaagaagcacttgaaactagttgatgaaagattcatgtaaaaatcaaaaccacaatgagataccatctcacacccgttagaatggtgatcgttaaaaagtcaggaaacaacaaatgctggagaggatgtggagaaataggaacgcttttacactgttggtgggagtgtaaattagttcaaccattgtggaagacagtgcggtgattcctcaaggatctagaaccagaaataccatttgacccagcaattccattactgggtatatacccaaaggattataaatcattctactataaagacacatgcagacgtatgtttattgcagcactattcacaatagcaaagacttggaaacaacccaaatgcccatcaatgatagactggataaagaaaatgtggcacatatacaccatggaatactatgcagacataaaaaaggttgagttcgtgtcctttgcagggacatggatgaagctggaaactatcattctcagcaaactcacacaggaacagaaaagcaaataccacatgttctcactcataagtgggagttgaacaatgagaacacatggacacagggaggggaacatcacacactggggcctgtctgggggtggggggcaaggggagggatagcattaggagaaatacttaatgtagatgaagggttgatgggtgcagcaaaccaccatggcatgtgtatacctatgtaacaaacctgcacgttctgcacgtatatcccagaacttgaagtataataaaaaaagatgcatgtaaaataaaaccctttaaaaaggtaagaaaataggaactgagaaatgaagagggtaaaaagatgttcagcaacctgggcagaggacaactacagccatcaacataaaacctggctctgtgccctctggtagccaagggaaaaagggatctctgggctttggagtattcatttaggaataaaagttgcagccaatcagcagaagggcaagctttccctaccaatcatttctaggggaaaattattgaaggtgtcaggtttttcataagcatgagtacagaactgagcagggagaaagactttgggcccaatgtctgaatatcaacatgcacccccgtttcctgcatttccaagatgtccctgaatggtgtatccaaaagatggcaaatttccctcctcagtggggtcgtgggctagcagatgagccccttgggtttcccatcacctcccatcagggactgtgatgtctttgggggcagaggggtctttgcctccattcgccattttatttgggagatttttcaacatagcctgactgggaaggcccaggtattcggtttgagatcatattgccttattccgactgcctctccagcctttggagggaggagcccttttctgctgtccaactgcatgcctgcagcaagaagacaagagtccccagtgcactgtgagctgaagaaagtaaccaatatttattgggtacctcctatgggccatgccctttgctaagtgcattgtcaacatgatctcatcaagcctcctactaagtttaggaggggagtgttgttaccccatttcacagaagcagaaactcaggctcagagaagttgggtgacttactagtcagtgtgtggagcagagactctgcccatgttctttccctcaaacctggtcactgctggggcccccagggcctagtcctaagggttattgtccaagccccatgtagtggtcaggctggatctgggctctcctccaaggcagggcttttccagaaggattgcagggctcagacactggagctgcccctgccttgacctgctcagcatggatgtcaaaacccactctgaacctggtccctttgccctgctttcttctcctcccccaccctcatgccctcatgtggcatcgtgcctgcctcaggagctctccttgtcctatgtagatgaagcaggcatgattggcaggggtctgctctgccctgcctcagtccccacctcttctccaagctgtgccaaccctccgggtctgactgctgcccctctctcttaggaaacctctgccccagcccagggaacacaaggagcctctccaaggcagaggaccctaagcacttcttttttttattattttttattttattttaggttctgagatacatgtgcagagtgtgcaggtttgttacatagctatacatgtgccatggtgctttgctgcacctatcaacctgtcatctttttaagccccacatgtattaggtatttgtcctaatgctctccctcctcttgcctcccaccccccgacaggctcggtatgtgatgttcccctccctgtgtccacgtgttctcattgttcaactcccacttatagtgagcacatgtggtggttggttttctgttcctgcctaagcacttattataggccaggcactgtgcaggcacctcatcatctcagtcagtctgcaccgaactctgtgcagtagatattattatatcctcatttatcagattaggaaactgaggtgaagcaagttgtccaaggccacccagctgttaaatggcagaagtgggatttgcacctaggtgctcaagtgcattggtttgccaccatgtgctcaaagagaaggggcacaagagcctcatgaagaaggcatagctagcctgacagtccaaaggccagcagccgctgtggccatgactcacacacacctgcctcctcccagaactgccacgtgggtcctcacagctctgtccttatcaacacttactctcctttacaggtagcctaggccccagctcccagctctgttcgaggctcgcagaggggcggtagtgaaggggtctcatttctccaggatcctctttgctctctcgcccggtcctggtccagcttccctttcaagcatagtgaagtgcatttgttagcttgcagccaaccctgggaaatcatgagaatttgttcccaagtcaactcattctccagcgtccacagtgacgtattcactcacccagttgagcgcctagtgtatactagaccctgtgacagcaacaggagtgcaaaggtgactaagacgtggcccctgctttttttttttttttttttttttgagacggagtctcgccctgttgcccaggctggagtgcagtggtgcgatctcagctcctcacaagctctgcctcctaggttcaagcgattctcctgcttcagcctcccaagtagctgggactacaggtgtacaccaccatgccggctaattttttgtatttttagtagagacggggtttcactatgttggccagggtaatctcgaactcctgacctcatgatccgcccgcctcagcctcccaaagtgctgggattacaggcatgagccaccacccctggccggccccgcttttaagagaggggagagaagacctgggccttagaagagctcagaggaaccacaattgactctgcagtcaaggagaggaggctcactgcggatgtggtatttgagccttgaaggatgagtgtggtttcatcaagtagaaaaggcagggatgggaaagggaggtggtccaggcaggggtgatggtgtgggcaaagccttgctgatattaaagaacatagttctgtgcacctggaacactggatgcatggggtgcattatgaaagatgggactgaagaagtgaacttggcttagatcccatgtagtaggtctgagaagtaagatttaacccaaaggttgcaaaagaaccatgcttgtgataaaggatgatggattggggaaacagagaaaaagacagacagactgtaggaagggaggtattagcaaataatcataacacagtgtgaggtgtgcattaatattcactcattccaagtattgatcaagaagagaggtaggtactgggttaggaaacagcttgggcaaatgcatggggaaatgagagatgtcaagatgcattctaatggcagcctcttgaagatcttaagttgtttttggttcactcatttcgcaaatgaattcatttagcaaaagcactatggatacagtgcttacctctaggaagtaagttttagcccaaatgctgcagaaggatcatgcttatgacaaaggatgatggactggggagagagaaaaagaaaagacagacagactccaggaaggaaggtcagtctgcagctccttatagtggctaggagaaggagtctaggcagatacgactcaattagcttcatctgctgtttgtctctcaaaatctagacatgtgcactgctctggctggcccacctatcctgggcattgagttaagtgtgggggctgtgtgttgagagtccccctccattactggcaggaactccacacctcagacattgagccccaggtctgcagggagaagacgtgcttgcaaagtgagctaaaagcaaaacagcctctgacctggcaagcattcccaagtctgcacgcctgcagccagaggagagggtgatgccaggctgctgctcagatgcttttcagccatacccaggccaagacctggtgaccaggcagccagaaggagttccaggaggcacaaggcaggaagttgggggattaggaggtgtagaatggagaatgctctggggagatgggtgctttgttggtgcaactattcgtttattcctccagtgaccacgtgagcagtatggctgcacacacaggctctgcagccaagctgcctgggttcacatttggtctctgtgctttggaaaatttcataagctttctctaccagtttcccttattacccatgagattgatgtgaggattaacctagcatgtagtaaatatcctataaatattattattcaatagtgtacttctttgccaggaacaaaattcacctgttcctctttaaatgtcctccagtctgtctcctgggaaagattcttgtgagctccctggggacagggaccatattttgtttgtctcactgtatccgtagtgctttttgctaaacgaattcacttgctaaatgaatgaaccaggaacaacttaagaccttcaagaggctgccattataatgcatcttgacatctctctcctttccacatgcctttgtccgagctgtttcctaacccagtatttcactacccctcttctccatcaatatttggaatgagcaaataccgttagtgcatacctcacatggtattataattatttgctaatgcgtctgtctcctccatgactctgagctccttgagggattattccatgttgtaccccaggtgccccatgcagatgtgtattttgtgcactgttctgtgtaggctacaaaggaaaaggcctagcacctgcccttggggagctcacccacccaggatggacagaggtgtgcagacagagctgcagggtgggcacaaagggtccatctgctgaagtcctgcagatgcagccccgagcttgtccctcacgtcagcagcctggctcctggtctcagagagaactgtgtggttcccaagcattcactttaggaagaatcacttgcccctccctggctctctgcttcaaggaactgtgacaaccttgggatttgcaaactctctctttaatccttaagaggaaaatgttttggtaaaaagtcaagattagcagatacactcgggtgaaattctttccctggaaataaagaatagagccattaatatccacagtagagtgactttaaatgcccccggggggtcagcaggaaccagggccctgaggaaaggatcagcgtggggaagaggctcccacttccctgtgaggagctgcacatgcagtctcactggagctccctgctgcaatgctgttgcctgtggtggttggtgtggatgctgcctgccaagagccctgattccccaggaagagagaaaaaggcttctctcaggacggccctggtcgcatctgcctgtacaattcctggagcctttggggagctgaagtcaggggctcaagtgcccctgggtttcctggaggaggcaggtgtggtgagacagctgacagacaggagaagggatgctctgaggaagtgactgtccagccatgggaaccagatggcccctggctgtagtcctgatgctgccacttgctagctctgtgaccttgagcaggttacttcacctctctgagacagactcactgtctggacaatgagtaaaaccctacctttcctgtctcagagatttggcaatgggacccaatgacatcaattggaaaggatgctgtgggtgaaaggtaacctttcaggacagcgacaagcctgtctgggcaggatgaatgggctgtggagccctgtatatcctagctcactctttgaacctcagtttccacttcttccctttttatttattgccggggtcttaaatgagtgttgggggtatctgattctccctctgcctgtacttttggggccaagcactgagctgaaaagacaattcctcctagttctccaagcctacaacctgccccctaaccagctgtgagctgtaatacattctccagtgtcactgtgaggtttgtgccttcacccccattttatagatcaggaaacagaggctcctccaagtaaaggagcttgcctcagatttcacagccaatgagtggaaaagcctctgggattcaaatgtcagagcccatatttttcctacttctcgcacctgttatcatatgctgcctcttcctttaacctgcagttccctcccttcacctccaccgtctcaatccttcccactctttaaggttcagttcagctatgacttcttctatgaggctctactcattttctcagatttcttcctcctccaaatttcttgtaaaaattatgttttttctctgattctaaaagaatgcacattacattagaaaagatacacaagcatacagaagataaaaaccacctaatatcccatcacccagaagcttccagtttttctttatgcatttgcatatgcatttgtgtttacttttccccaaaagttctccgatactttgtcctacttttcttttgacccttataacttcctgacttcggtacctttctgatttgccctaccagagtgtgagcccctggaaggcagcctctgcaccctgattcaggttgccacacatatgccagctcctagtgggctggagggaaggacatgcggttggggaactggaagactcatgctttcagctgtgtgcttcctccctagagtgcaggcagaggaggaatcgaatcccctcagcactcttgtaaagaccacagcaatgagtgagagatggtgcctgccagacataccattctttacttttcagcttaaaacagatacaaagtttggggaggctcactggaggaggcttggggctacactggaaagagaagaacttggattcacaccccagcttcccctcttcccagctctgtcacatttgcaaactctgagtctcagtatcctcatgtgtaaaatggggatagggtttatagggttgtaaggatgagatgatgagttgtttgcaaacaacttctcacagtgcacagtgaaggtcagcaatgagagccagccccgccctttcttctttccaaatgattaatatatctgttaccagcctccattcattatatagctctgtcatgtgctaagcaccatgggggctgaaaaagatgttcttcctgccttaaaattccactggggatgaacaaattacacgggagctgatcagagaggaaggcagtccattatgagggctaattgagcagtgcagaccatgttgcaaactgagttagggcctggagagcttactgtgtgctggggtcctcaggaatgccacagatgcatcaataaccacctctgctactctggaagtagtcacatcaggaagactccagagataagcttatctgggctgtggccacagagctggaatttgtaagctttaggtttctatgtctcatgttaccagcttgtctataaattgtaaattacagccatctgatggttagggaatatgaagtttggttaagagaatgaaatgagaccacgaagattagagaacaggaaaagaggggactggggactacatacccatcagaatcttcattcagtcctgaccctcagcaggagggggatttcatcaggctcatttccatccttgatttcgtccatcctggttctcctgacaaggggcatttatcagagttatggcatgggaaatcacaggggagtaatgtaccatggcatttaagagtatgaacgttggagtcggagctattttctccgctacttactagctgtgtgactttgggcaagttacttagcctttctctgagcctcactttctttatctgtaaagtgagggcgatcagaataaacctccttcatatggttattttgagctttataaagagacaatactggctgagcacggtggctcactgccagtaatcccagcactttaggaggccaaagctggaggatcgcttgagcccaggagttggagaccagcctgggcaacatagggaatgagactcctgtctctacaaaaaatatacaaaaattagtcaggcatggtggtacgtgcctgtaatcccatctactcaggaggctaaggcaggaggatcgcttgagcccaggaggtggaggttgcagtgagccaagatcacgccattgtactccagcctgggcaacaggagtgaaaccctgtctgagagagagagagagagagaaaatactactatggtgcttataaaagttcaataaattttagctgttgttagtattattaaagtaagatctgtatgaaaataaagcagattttttcccccaaatgttcatgtcagaagtatatatttcattggcaaggggctgcttctggaaggttgagaggtatcctgggggaggggatagagcactggcaaaattggcatcacaattcaagtcacctcactcagtgttttttaagttatcaaaatccacagtatgaaaagcatttgacattacagtccactatatttatgcatttataaacaagagaaaaaatcacgaaaaatacagtaccacgtgcagtacacactgattccatctattctttttttttctttttcctcaaatgcacttgccgcctacttattccagacccaatgattgggtccctatccacagtttggaaaacactataagaaatgattgtgtcctctcactttccctctctgggatttagttttccaactataaaatgctcctgatgcccagccagcctcaccgctgctccgagtcaatgccaggaacgctgatttagcacatgctatttggagggtacccatccaggtgctgtgggagggacagagattgagaagagtgctttctgaccccacagaggccatttggaaaccctgggaatgggtgggagggttggaggtggggattgcttctcccctaagactcagcgtgatggaaaggcaatggggtgggaactaactggtgttggtctgtcccatttgtgtcccagcagccttcctgacagcgagataggagaggaccccaggtacagccttgggactgggtcagaagtgggtctcaacaaagggaaggggtagggtgggggtggaggacttgtgggtgggtaatgctgagtatggattcagggatgtgcagcctacatattttcagagacatggggctaaggcctgcattctcaatgagggcaaaatttggttcttggggacagaaaacacttagacattgcaatgctttgtggctgtccaaagtaccaaacagatgccagtatatctgtggtgctgaaatttcatggtgaatggagtcagaaaatagactagcgattgccagggtctggtgggagagagagggaagggactgccaatgtgtatgggatttgttttggggaagataaaaatgttttggaattagatagtggagatagttgcacaacctggtgaacgtacttttagtttcagaggttttctaaacctctgatttttttttaagtgacaggaaagacagaaaaaagtatatctaaaaaggctctaggggtgatcatggaaaagaaagttaagaaatatgactgtaaggaaaggagatgggtgtccctcaggccaggcagaaaattcagtcttgttgctttatgttcatgtgcaaatctaaaaaatccaagtgatatagattaatgaggctctgagtccctcaaaaccttccctccccttacctctccaaaaaacacttgagataccctagaggtggtatgaagtcaggatgggaaggttggctcagctttgcaaataagtttaagcctctggcctttgctctccaacaccaaagaggcttcactttggtatattttctctgccctttctccctccttgtccccaactgtcagtatgtgatgacaggctcagcctctgtaatggtagtgatcatatttcttgagccaaaaatcagacctcatggcatgtgacaagtttgcatatgtggatgagaacagagtggcagaatatttgacacgggagcagcttgggcagtccagggcacatggcactgcacctgacatccctggcagatcccccacattccgtggttgtcttctgatggggccatatggggctgcagatcatgcctggagccctcgcagctccagggctgcgggttcccagccccagagtgcaggtgctggtgtcagcctgcctggcctggcctggctctgtccagagcactccttgccccagctgtttgtgcagctgtatcagcctcagacctcagcctattcattccaacctgaatgcagaggctgggtctggaggagccacattgcgggcttcatactcctgatctgacaagttttccccccagagcctgcaccaatggcacctctccccattctccctcttaactgggtcctccagggccctcctcacacacccacgtggtcaggcagcagaggcttccccaagatgggcacaccccactctccacacctctctatgcagcatttgtggctacagactgggtccaggggattgtaaaggcatgctcatgttgggttggagggagctcaggatcttcctggaggatatggttcactcccatgagagctcagtatgcctttcctcccctgctgcagcccagagcgggagacagcgaccgacttggatatcaggtactgcgtcctgggaacattgccccccagggtcaactccctccagggtgctctcaggcccaagggagccacatcaccctgctgggcagcccccagaccccagccccagtgttgggggaggccagggagggcccctgtgctccaccaggtggctcgggagctgctgctgtttctgtgcatccatttactcccttcacataagatcatttttatctgggatctctttttcttttttcttcaaaaaccacatcactcaaaatgtggcttccttggctctgcttttaaaaaaaaaaaaaaaagttcttccatttggagaattacctgctgacttcaaagtccagtggcttgagggctacccaaagagggaggaagccagaagttgagtgttcccttggtttggtcacacttttgggctcctccctgactaaggaacaacagactgcagggctggggcaggctgggtgtagggcagggaggggatgaggtcctgctgccccagtcagttgagacccagacctctcaaacctgcctgggggaaggcaaggccaccagaggccacactaagcagatttctaccaactgcacctccccatccccttgcctccatctgagccatcagcttgacaactgcctctgagaacaagcccctgagaatgccttccgcaccccctactcccgccctgctttttccaggaagagaggccccgtggcctatgcttcgcagaaaccatggctgctaaatgccactgtggaggagaacatcatctttgagagtcccttcaacaaacaacggtaaaagcctgtcggagggaggcaggatgtggaggggaggaactgtctctggccagcctgccccagttccgggcccctccatcgatcacccacacccagccatctcactccccaggtgcttacctgcactccagcctctccatatggtgcacctggagaggggccaggtgtgcctgagcattggggcaatccagctcccataggggagagggcaggaatggagggaagggagagagccccgctgccttttctctagctggtgggagggctagctagctctctctgtgagtctccattcgcctggctcctgcactattttccctccaatgataatagttagggctagcatcgactgcgctcttactacataccaggcacagtgccgagctctttgtacacggaatttcctctcatgcttacaacaacctcagtaggtagatattattgttattcccactctacagatgaagaaccaagtttcagaaaggtcccaaggccacccagccagtaagtgaccaagatgggtctcaaatccaaagctgcctaacacctaagtacatgtttgtcaccaacatactctgatgcctccatgaactctggctggcacctgcccaggctaagggctggctggggaagtatgagaggaacaggctgggcaaatatttgaccagccatcatcattactgcctaaaccaaccagcagtggttttccctgcagtgccccaagcacgggttccggctgcagcttttcccactgcacagagatcatgagcgccctttcatcacttactctgcatatttgttcccaaccaattccatccttctagtatttaacctgcccaaacgctgtgtgaagtgctgacctcagctcttttcaagctcacacggtgtttgcttgcacccaagcgggaggcctattaaagccattgctcaccctgggcatagctacccagagactaatgaccctctgcaagtgctcgggccaactctgaccaggctgaccagctgcatcccctgcctctacccacgccaggtacaagatggtcattgaagcctgctctctgcagccagacatcgacatcctgccccatggagaccagacccagattggggaacgggttagtagcagcctctgaggggttttttcaaagccaggacccccaacctaccatgccctgagacactactcaggacaatgggtaactaggaaataggagacattgaaggctgaagagttgcctgcagtaaggtcaaacatgttgttcttgatgatgtcctttgacaggttttcagtcctgcttggagggcaaggtcagcttagtgccctcccaggctggggatcttcttcatttgcaccccaggtatacactgagagcccacacagcactgtgctcagcctggggttgtattgttcctgttcatcctccagatggggtcccctccacaagcttagacgaacaggattctcctgtgactgtcctccttttgtgtgattttaatccctgctgcctctgtctttgtttgtactggtcagatggtccctagcgcctacacaatgaatctttaaagacttggggctcatgctgccctcttctgaatgaattcagtaaacacgtgcaagttccttctctatgcaaggtgagaagcaggcaaagaagtggatagagccaggcctccatcccaaagagctcatagtccagtagggtacaggacagtgtctcctgaatggctgagggcatgatgtgttcctcctctttggtgacagggcatcaacctgtctggtggtcaacgccagcgaatcagtgtggcccgagccctctaccagcacgccaacgttgtcttcttggtgagtgcaagttcccttggggtcctggtctctggctgcctcccaggcctaactgcccacctccacctccccgcaaccccaccatcatccaacaatctccctctccaggagtaaatccctcctgccagagatattgccttatcatcctagtgatagggaaactgaggcaggcaaggatagcacaaatgacccattgcagacttcagatggagctctgcagtagccaatgaggagaggcaagctgtagttataggctgcctgtctgtgggacagcccaacccctcaacacttatgcagcccgactataagaatggctgataacagaatgtgtgctgccacttcccatcttatgcccagtgcagacattgctaattgttcacagcattatttcccatggaacttaactcatcctcagaatccttctcaacacagcactccaggtaaccactagccatcaaacatgagataaaactaggccaggcgcggtggctcacgcctgttattccagcactttgggaggccgaggcaggcggatcacgaggtcgggagatcgagaccatcctggccaacacggtgaaaccccgtctctactaaaaatacaaaaaattagctgggtgcggtggcgggcgcctgtagtcccagctactccggaggctgaggcaggagaatggcgtgaacccgggaggcggagcttgcagcgagccgagatcgcaccactgcactccagcctggggacaaaccgagactttgtctcaaaaaaaaaaaaaaaaaaaagaacgtattcgcaatccttacactacttcatgtcaagttctgttgtgtcaggtgccttgactgacactgaagaattctaagaaccagtccttggcctcaaagatttagaatctgattagggagacagagctcacccagttcaagaggcccagcccggttcaaatccaaactgtgcggcataaactatgagggggccttgtccagggagacaactgtgagggctggagtaatcagggagggcttcctggaggagagcctcaaagggagagtcaattaaacagaaggaaagagggaggccatttgcacagtgagttggaagaaggaagctcaagtctctgattccagctttattccctcccctctccctacaccacacgcacaagcactcctttactaaagacacttcacagtgggaagattcagtctccgttaccgtctgacacacacacagcgttttacaaagcatgggtgcattcgcgatctctcatgagatttaaacaaccctgctagagaaaagtgaagtggacattttatttcagtaaacgtttatgaagcgtctactctgtgccaggcactaaacgtttatgaagcgtctactctgtgccaggcacaggcacaagaagtctcagttcttgggagtgccataatcaggaatggacaaacaatgatcagatctggctttgcgccagtgtcacgggaatagggaggaaggaagggtaggcgtgggggtcaggacaggatgcaggaggaactggtgcttaggtgagcgaaggatgggtgggagttcacaaggcagacaaaaggcagagcagcactccaggcagaggaacagctcaggagaaggcccagacggcaggcttcctgggaacctggaatgcagagtgctgggaaagcacagatgaagcatgagtctagaagggaaagcgagaggttataaagcacctggaacaccagcccacagggtttgactttagagatgatggggagccgttgaaggtccaggagtcaggcagtgaagtgattagatctgtttgagagtgatatctgacaactgccccattttaaatgaggtaaccaaggcccagagaggttgggtgagttgtccaaagccacacagctaactagcttcagtccctagagcagagttgatagaactctaatgggttttatactcattgtcacccctccccaccatgcctttccctaccctctactctcttcctctcccttctgcccaggatgaccccttctcagctctggatatccatctgagtgaccacttaatgcaggccggcatccttgagctgctccgggacgacaagaggacagtggtcttagtgacccacaagctacagtacctgccccatgcagactgggtgagggggaacaagggggtcaggctatagggggcagggctggggaggctgtcaggcatcttggcaggaaccaatccgttgtcttggtagcaactgctgagggccacaaagcataagagaccagcactggatggctttatgcatgctgggcatttcagggagaccctgtacaggccaggggtttggtatcacctagacccacagacactccccatcctggcccgggccccccatggtacactcaaggctggcaccaagaagtctcaggaataatcaagtgctcacttctcaccttctgattcctgcccttttgatgacccatccccgcagtcatggggagtgcccatttggatggaaaagccctcttcccaccctatgaccttcccggggtggatggatgcaccaccccgggaatcatatgggaaatatggaaccaaacaatagcagtagtaatagaaacttcaggctgggcgcaggggctcacacctgtaatcccagcactttgggaggccaggacaagaggatcacttgagcccagaagtttaaggctgctgtgaaccatgatcatgccactgcactccactacagcctgggcgacagagccttgtctctgaaaatttgaaaaaggaaagaaagaaagaaagaaacttcaatattatcagtagagtccaatgttgtgaaacccctcattaactaaatttccatactcttcagtaggtagaaaataattactttttgattcattagaaagcacttaatttttaagatggagatcatgtaattttgaactctaggtcttgcctactcctatataaattctcctctaaacaacagccaaaattgaggccctctttgagcttcaggctggtgccaaatggctctgcttattttccccaaaataaatcttccttccatgtatgatgagaccccctccagtataaagaagacccaaagaaaatcacccaaagaaaaaaggcccaaagataagacccaaagacctaaagatttaaatatatatacagatacagaaggtttgtttctgagtttctgtagtgaccttggcaataccttgtagttcaggacaatcctgaggaacacagaagtgctggcttccttgaggaatcagtgatcaggactctcgagccccttgaaccccagcatagggcgggagggggtgagggcagcaggggtgggtgtctgaattaatgtcaggtctacgtgatggtgtcatcaagtgttccagataaaaagttttattgagccgggcgcggtggctaatgcctgtaatcccagcaccttgggaggccaaggcgggtggattgcttgagcccaggagttcgagaccagcttggggcaacatggtgaaaccctatctctataaaaaaaaaaaaaaaaattagccaggtatggtggcgtgcacctgtggtcccagctactcaggaggctgaggcaggaggatggcttgagccaggaagcagagattgcagtgagctgagatggtgccattgcaccccagcctaggcaacagagtgagaccctgtctcaaaaaaaaaaaaaaaaaaagatttattgattccaaagaggcatggccacacacacttagaccagcaggtgctttgctaagccctgatggaggctgccagacccgccgtcaagaggagctaagggtagtgtacaatgagcccacttagtgtatgacggccgctgccgtgggtggagtccttgtgagtaaccagccagcttgagcaggatgcactaatttgctctgcaaacccagccattgagaaatacgcctcagatgtaccgaactctaggtcctaggagtatgttggttggggtaggttatcaataccagcccacttgcagtggatgagctggtggccatttgtagtgaggaaagggatgtgtcaacctccatcttagactccacaattgagggatgtgaccaccattcctccccagccagcccccaaaccacgtttgttgctgcctttccagatcattgccatgaaggatggcaccatccagagggagggtaccctcaaggacttccagaggtctgaatgccagctctttgagcactggaagaccctcatgaaccgacaggaccaagagctggagaaggtgggtatatccagggatggccaagcagccacccctggatgcaaaggttctgctagaacctgaactcataaaggtcttcctgtccttagtgccccaggaagccccctaaagggcagatgtgggagctgggcatgaactggctcctaccagaggagagacagtacctgtgccaggtgcccagggcagaatcaggtgggcaccttcgccttatcctgaggtagtcagatactatttagttgcaaagtttcagaaaatcaactcaaactggcaaagaaaactaagcaaagaaaacaagagggaattaaggatttattgacccatgaaaccaaaaagtccaggtgtgtcatagctttaagtgtgctggatccaggtagtcagtgtaatcagaaatctgtttctcccatctcttgactctgctcccctcaaattggctcagctcccctcaaattggctccattctcatggtatcagtgagggccaccagcagtcttaggtttacattctcccagctcaacaactctgccagaaaaaaagtgcctctttccccatagttcagcaaaagtcccagggctgagtctcactggtccagtttggtcatgtgcccacccctgaacaaatcactgtggccagcggtgtggaatgtgaggattggcctgtcctgggtcacgtgccactttgggagccagatccacctgaatcacagagactaaaaacaggggaagagtggttccccacagggatatgggggtgctattatctgatgaaggggaaggactaaatcctggcaagatgaatgtgtgtctgtctgcccctccctcaggcagggacaaagtagaaatctgacattggtcatcaccagagtagttaccccttaacttccccttcccccaccaaccatatatcctgaagacattgcccaggccacatctgtcttttaggagactgtcacagagagaaaagccacagagccaccccagggcctatctcgtgccatgtcctcgagggatggccttctgcaggatgaggaagaggaggaaggtacaggcaatgggactgggagtgaaattatggcctgaggtctgatcagccacagagaggctaaggtttggggttctgggtgtggtgcagtagtgtgcctttgattaaatggcttccctctgtgtgcccccgttgtcccctcagtaagtggggataaaatgccctgattcaccctcagagggatggaaatgtgtagccacagagtgggttcttgcggcctgcagaggaggcagctgagagcgaggaggatgacaacctgtcgtccatgctgcaccagcgtgctgagatcccatggcgagcctgcgccaagtacctgtcctccgccggcatcctgctcctgtcgttgctggtcttctcacagctgctcaagcacatggtcctggtggccatcgactactggctggccaagtggaccgacagcgccctgaccctgacccctgcagccaggaactgctccctcagccaggtgtgactggcggcccatggcagaggttgggagtggggatgggggaagggctgagcccatgggcaccctggaactccaaatcactctctgcctgtgaaggagtgcaccctcgaccagactgtctatgccatggtgttcacggtgctctgcagcctgggcattgtgctgtgcctcgtcacgtctgtcactgtggagtggacagggctgaaggtggccaagagactgcaccgcagcctgctaaaccggatcatcctagcccccatgaggtacccgtctcccctggccaggctgggactgtgagcaagtcactgttctctgagccttagtcttcccatctataaaatggggatatacaacctgtcacaagcttgtgggggtgactcaaggagacagtgtgtgtaaaagtgccctccttgtgcaagaagcagggagaaactggcatttactcagccagatactgtgataggcattgtgtgtggttagctcatttaattgttaccatggccctttaaagtgagcgtctgcacatccaagtaaagattgttttctcctccctaagtgggtgtaatttgcccatccccacccatgagttcagctccctgccctcccctcactctctctccctcagccagcctcaggttttgacactgggggaacaggtagctgttctattaataatttcctgtaatgggatggataaaaatctcaaaggccacttgatgtcaaagaggtttaaagttgtccctgcccaattggttggccaacttggcttaaaaacacaacaggcaaacagattttctggccccttgtcgaggctagacctcacaatctaactgcactttttactttccagcctcatgagttttctgtggcccacagatatggcctccaagtttatttacttttactctctatttgccccagctctgtagttctgaaactccctggttggggttgggctgactctgggtcagccagccggcaggctgtccccagggccctgttcctcttggcaggttgtccctctggagaggactctgtgtcccaggaggacagctgctgagtcaggccgagccggcagctgagaaaggcggcagtcgtcagatgggcttgagaaactgaaaggctaacgaaaggccagcgcccctttgggcagctgcaggaattcacggggatacaggccagatgtctacaaattggcagaggatgccagacccatgaatgactccagagacacttacatgaaataattaactatctcattcagtaaacaggaagtaaatcaatggacaaatgagtaactcttcctctggctgcctcttaggttttttgagaccacgccccttgggagcatcctgaacagattttcatctgactgtaacaccatcgaccaggtacagaggaccgtgccacactatccccccttccagagacacctcggacccctgggggcttctcctgtctgaggctgggttccccagatcaggtgatcacagccctctgggaagaagccagtgtccccgatccgattataatgctgcttcagggctggggcctccctcgtgggagcctcacagtaaggctgagggaaaccagatccctttagcttccacctgagatcccactggctttctctagtaaagttccagcatattctgaaccaaggtggctgattgtatggagaatattcattttgattcagcctgtgttctttatttaccattgtaccagatggtgtgaaaacaaaatcttgattcctacctcagggagtttaccttgtagctggagagatgagatacgtgcctataataaagggagagcaaggccgggctcagtggctcactcctgtaaccccagcactttgggaggcggaggcaggcggatcacttgaggccaggtgttcaagaccagcctgatggccaacatgatgaaaccccttctctattaaaaatacaaaaattagccaggtgtggtggcaggtgcctgtaatcccaactacttgggaagctgaggcaggagaatcatttgaacccaaggggcagaggctgccgtgaaccgagattacgctgctgcactcaagtctgggcaacagtgagactcagtctcaaaaaaataaaggatcaaaaaataaagtgagagcaaaacatggcggccagtagcactctaaacacagtcaataccaaaattcacctcactctctccccctcgtctccctcagcacatcccatccacgctggagtgcctgagccgctccaccctgctctgtgtctcagccctggccgtcatctcctatgtcacacctgtgttcctcgtggccctcttgcccctggccatcgtgtgctacttcatccagaagtacttccgggtggcgtccaggtgatggcctcaggggtgaggggtgggaggtgctttgcaatgtgcagtttggtgtacttgctagactcatcgttatgagagtaatagggtcgtgttccctccaaaaaataaaaacaaaaaacagaaatgaaggaaatagaaatatccacatcttattccaccgccctaatataatagtctgccaacacacgcacacactgaggttgacatctgaattatttccttgggcgatatggtcaggactggaattgctaggtcatgataaatgcacattttatgcccttcattcattttgccaacatgcttcccaggagggttgcatcattctagtggtcaggctgattgctgatgcatgaaatcggcgggcacctgattcaagcagtgttatgataacacctcccagcccacgtgagtccagagtgtagctgtaagccttgacttgagggagcctctcacagccattctcatggatcacatttgccctcatgagctttggatccatgcacgcctctttcctcctcaaaattttctaagaatgttctctagggagttctttctgggagtgattctcccagattcatagaaactcatagattcaaaaaattgtaggaaaaaatttaaagaacgtctaggccagtgtttctcaaactgccaattacagcccatcagtgggtcatgaaatcaatatcatggatcacaaccagcatttttttaaaaatgaaaaaaacatcagactgtattcatagagtaaagcaagctttgcttcatgaaacctttgtgttggtcatggaggtgtgtgagtactgatttgtgagataaaatatatttctgactgcaggttgtggtcagaaaggttaagtacctttcccaagtgcacatagttggctagaaactagagttgagatacttattagcaataataaaatttagatgcattttggacacaattacctgccccaaaggatcaacatttgtataaatggctttttgcttggatgatccagaatggcccgacacccacacgaacaacatagctttttgacactcaaaaaattcaaagtgctgcacaagctgttctacaaagttcatttcttctgccagagaaacagcccagtctctgtggcacccagtctgaccctggagatggtttatcagggaaatcaacttcctgcatcccaaactggcctccctggcactgatgtgcttgtcgaggtgcagctttggggagcaggaggcaattctgttgccatggaaacctctggccttaccccgagacgaaacctatcatttcagcacatcactggccagggtctaaagagctccttgatggggtaagcggaagacggggttgaacgctttgagtttggtcttctgttcctttggccagctgtctcaaggttcagattgttcacctgtaaaatggaactagcactgcctgcccagccttagctcagctccaggctgtgcagcagaagtacagggacagatggcgacctggggttgacaatgcccaggacagcagtaattgtgccccacatcaggctgtgtctaagcattgtacataaacgatctcattcagtgctcacaaaagctcaatgggctggtggcattgtcttcccccttcacggggtaagaagctgaggcctagagaggtaaggccattcacccacacagcggtagcaggtggagctaggcttcaggcccaggccgagccctgagcctgccctcttaactgttccactctgttccccgccacagggacctgcagcagctggatgacaccacccagcttccacttctctcacactttgccgaaaccgtagaaggactcaccaccatccgggccttcaggtacgagtccacattcccccaaggtaggagtggaacaggggtggggccagggggcacaggccatgagatttgattctcaggactccacttgggaaggccaaggacacgttctctctcaagctgcctcaggtcccaaggcccaagggatatccaccagcagggacaggccaggtgggctcccactgaatgttctagagaggaaaattccagctctgtagacaagcccaggacctctgtgaggcagagcatgaaaagagacaaagctgggacaagtcttcatgtatcaacgctagaaagggccttaggtgcgggccaccctaagcccttcttttattaaggagcccctgtgtgccaaacactatgctgagtactgtacaggccaatcccactcattctgcactgcaaccctcggtgctgagaatggtcatttccattgcacagacaaggaaactgaggcacagagacgttctataacctctctgtgtaaggtgccacaaagcccagacttgaacctatttgttcatgcaacaaacatttactaagccccgactatgtgctaagccccatgccaggcactaaaaagatgagtcaaataagccgctgccctgcaggcgtttacagcccagactttgagcaggccaggataaatccacgtgacaagtattctgaaaaaagcggattcaagggctgtgggagcatagaagagagacagtccgggaaggtttttgtaccagaggtgtcatcagaactaggactcaaaggaggggcaggagttcaccaggctgaggaattcctgaaaacttcagtgcccctgccatcgtctcactaccctgagtggtgatgttggggtggacaggagcatctgaggttgcctggggaatgagggaagctgttgtttcccactccccaagagtctgtctgatctccagaggcatctctcttccagtcaggcaggccagagacccctgacacacaaagttgggctcttttctcatcttcatccagagagtgataataggttatttttagggtggcacagctgcacgaagtatgacagtaaccatgagacaccaagcactgtgtccaggagtaaccatagggcacaaggaccagccaagggccagagaggcttacatctcctccccccaacccctgaagtccagcttcagccctggagaggtatccaggcccctctgcccaccctggagcacctagggccagtggaaatccacctcttagggatcttgtctaagtaaagaagagcagagcaaagctctgccctggccttggcgctgctccctggacatcccttgcccctggacaagcctatgctgtgtcttccacaaagaagcttgctggggactggattatgactctagagtctcctcccagcctcctcttctcaagcctgaacttctcccgttccttcaacttccaggtccctcgacattactgagcctagcctttgctctaagttttggtgatttccctctctcaattggtgtctcagagggccctggggtagagagatggtgactcttctagagtgggccacagccccttgtgtgcagatcccagcttcctgtaaacagcctcagatcaggccaaacctgtggtcagccagagccactgctacccagtgaggtcttccacaccctactgacacggtgaatgatttttaaatttgaatgaaaggctttttaatcaaccccatacacatttaatgcattggctttaatccagcagcctgttgagagctattagcacttattgattgcccacttactgtatgccaggcaccgtgctaagtgttgtatgtgcattattacatttaatcctcacaaggaccacataacataggtacgaatcgccacattctccagatgcagaagcgagacccagagaggctgggtaatcaatccaaggtcacacagactgcgggggctggcgctgagcttggaacccaggtttgcctgaccttctgggctttcctaagagatcttattttttcccaaaagagtttcaagagtgcccagcactgggctcagtggcgggctcggaggttgttttcgttcatgtaggaactatcacttccccatttttttcataagaaaactgagtctcagtcctgatacacagccaggaagttgtgatgttcaggctccaacctgggtttacatggctccgaggctggggctcttttctagtcctcagacacactgtcgcacgcctgtggcagaagctcccatctcacacttgccgaccctcaactcacacagtcctgagacccacatacgctgagcgcctcacactcctataacacgcacatgccctgatgcacacacattttcaacacgcacttactctacccttcaggcatggtttcacactcactgcagacacgtcaccctcccacacgtctccaccctgggggtgtgcagtagcatgctctctcccacctcagaacctcccttcagtcccctcagacacatgccctctctccacgcagagacaatcaaagctgaactaacaccttccagggtgaaaagcaaatgcccagtaaggtacgtcttgggtgcctccgtgtcccctgagtttggtcctatcaaaccagcgatgatgaggcagcttttctttcgttccttcctccatcatcaaacaagtgctcctgcatctcctctgggccgggcctacgtcagcaaggtctgagggaagcggccaaggagagtgatgacggcagcccaggttgatcagagaaaggaggcaggtccatgcgcagtaactcagggaaaacatgatgaggacctaaggatgagaaagaagcctccagagttccctgtgcagagagattccatcaatttcagagggtcaggggagtgccatgcattcatccaacaaatatttattgatagtgccaggtgctggggtatattggtgaataaaacatcttcatggaatttgcagtctattgagggagatgattataaatagctagagaaatgcatgtacagcagatactgtggagcaaacaggttgcagacaataataggggaaacctactttatagtaaggtagtagccaggaagagcctctctgaggaggcagcatttaaggcaagccctgaaggttgagttgagccagccttatgaagagcaagggcaaaagccttccaggaaaagggaatagtgtgtgcaaaggccctggggtagggaagactttagtattgtcacagagcttttaaaaagctgagtggctgcagcatagtgtgtggggtgtttgtggcaggaattaggttggcaggagggggttcttcatcctataagcagtggaaggtcattaatattcttttttatttgtttttttttttttttttttttttttttttgaggcagagtctcactttgtcacccaggctggagtgcagtgaggtgatcttggctcactgcaacctccacctcccgggttcaagcaattatcctggcttcctcagcctcccaagtagctgggattacaggtgtgcaccaccatgcccagctactaatttttgtattattagtagagacagaattccaccatgttggccaggctggtcttgaactcttgacctcaggtgatccgcccgcctcagcctcccaaagtgctgggattacaggggtgagtcaccgcatccggccggagatcattaatattctaaacagtgggggagaggacacagtttgcgatttagatagattaagccagccactgtgtggagcatggactgtagggagacagcaggtagacgtattcaggaagctgatgcagtagtccaggtgagagtttgtggtgggcaggaagcaggatagagggggagggaggcaaggactcttttagagagagacataagaggacttgccaaggggctgaatgtgaatccaggtgattcctgggtgagaaactgggtaaagggaggtgccccttattataatgggaaagacctagagaaaatggatcttggggtgaaaacaagagtttggaggaggtggggattctggacaggtttgaataagcagaaaggagtggggtggacattccagagagggatagcttacatgaagtggccacggtggcatgtctggggactggaggggccctggagcctccctctgcaggtagggagactcctaggagctatgtggaccaacactgttcccttaggagcttctcatcctccctccaggtatgaggcccggttccagcagaagcttctcgaatacacagactccaacaacattgcttccctcttcctcacagctgccaacagatggctggaagtccgaatggcaagtgctattcccctctaccctggcctctgataggagggtggggccagagcaagagcacacaggtacctggggatgaaagagaggataggataccagatcgtgtggacaccaagccttcctgcttcccccagccctggtggtcctcctagtgtctagcctgtgctccttttccccatatcactgcctggaggcttgtgtatctgaggtgtgtgccagtggcaagaacagttgtggtgaatgtgtatctgcagtgggtcatatgacacccacattgtgtgtgtttgtgggccagctgaggcgtgcatgttaaagggtgtgcaggggctagggggtaggggagcatgagcttgtgggacatgttggctcctggggctccagccttcgcagcccttgtgtgtgtctggtgacgtgtgcatgagttgcagggctggagtggaggcctggctgagctgctctctgccccgaaaaggagtgaggtagaacaggggcctgtggctctaacccctgagcgcccaggtcagctcctctccctccccaggagtacatcggtgcatgtgtggtgctcatcgcagcggtgacctccatctccaactccctgcacagggagctctctgctggcctggtgggcctgggccttacctacgccctaatggtgagcggcagtgggctagggcagaggaggggtcagacaccagcactcccggagcaccttcgtcactggagacatgagacactcccaggccttaccccaatttcatttgcatctgatgccagagggacagtgcgggcaggaaggctgaccagcaggccccagggcccaggccccagacaggtggaggttggggagccacatgactgaccctccctgtgcctccagggagggctgctctgagcaggcagtggatggcagcaaaaggaatctggggccctggcccctctccagccttaagaagagccattctggtggctgaggacagaactaagcgaccatggagtgtgcgccactggcttgctccccacaggtctccaactacctcaactggatggtgaggaacctggcagacatggagctccagctgggggctgtgaagcgcatccatgggctcctgaaaaccgaggcagagagctacgaggggctcctgggtgagaggctcagggagaggggtggggaagagtccaaggaggagtgtgtctgggttgggggccacaagggagcctggggatggggtggcactttcggatactagctgtggcccatgcctggtggctgagcccagcccggcccccagcaccatcgctgatcccaaagaactggccagaccaagggaagatccagatccagaacctgagcgtgcgctacgacagctccctgaagccggtgctgaagcacgtcaatgccctcatcgcccctggacagaaggtcagagcacgggcccaacccaatgctgcaggacaggcgtgagcaggggatggggcatgcacggagctggatggcttcgcagtcacctcgtggccctccagggccgaggcctctcactattcagacatcgcagtctcctgccctgggcctgtgggggcccatctttcctctccttctattgccttcccccagtgctgccctcaggccttgtcttctcactcatccaccaaggagaccgacactctggactcccccagctcacacgggctttgtcagggcctccctctctgcgaatggtcaggggctttccctagggcactgccccgagcttcagggcagggacctgggggcagacagcgaggccacccttgtattgagggtgagcccctgcctatggccctggcccagctctcctctcgtttcccactctgtctctttgtctctgtctcactttgctgtggctgtccatgtcattctctgaccttgggatgtacctctgtccctgcctctctcatccttctatgtcactatctgtctccgtattgtaatttctgttggtacccaagtgccaggaagcaacgggatcagaggtggctccattgtagggcggggcacacagacacatccatgcataccactctcagctgcccctgtgtcctcctgccacacccatgcccatagagacacaccactgccccccagctctccttcagccaagtacccggcacacccagacccacaccaaggcccaggcaaatggacatccatgcctgcacttgcgtgccggtccctgtgtaagccctctctggacccactgcaggaaacaagcccaaacctgtggtgtccaaagagaaactagtcagaaaaccaggccaaaaagataccctgtgacctcccacacctgcacacacacccagagctagcatagaggctattcccagcagccccagagtcccagtggcggtgcctgcttctctctttccagatcgggatctgcggccgcaccggcagtgggaagtcctccttctctcttgccttcttccgcatggtggacacgttcgaaggtgagttgtaaggcgggcaccccacgtgtacccacagccaccagatgaggcctcagccctggcacgtggtcagacatgacaggaggcccagcagtcaccgccttcccctgcaccctcactgggacccatgcagggcacatcatcattgatggcattgacatcgccaaactgccgctgcacaccctgcgctcacgcctctccatcatcctgcaggaccccgtcctcttcagcggcaccatccggtgagccccaccacccctcaggcccacccagccccaggccggctcagttccatcagatctggagcacaaagaggagggggttgggggagaccaggatcccagaggtgtttcctgctcatgcccttctccatcccatcaggcccaggcagcctctggaaggggatcccccacccatgggtctaagatgctgtcccccacccactgccaccacctcggtgcttctcccagccagacctccaactcagtctgctctcgctcactgccctctttgccgcctggggatgcaggcaggaccctgctccctccctactggggctttctgtgccacttccagatttaacctggaccctgagaggaagtgctcagatagcacactgtgggaggccctggaaatcgcccagctgaagctggtggtgaaggcactgccaggaggcctcggtaactactcctggctatgcagctgggttggttgggcactcaaggaccctgtaaggatggcagacagaagcccgtgtctcaggtttgccccaagtttggagtctgaagcctggcaggaccatttagtcctacttctcactatacgggggcccagagaggtcaggtgtcttgccccaggtcacacaactggtcagttcagggtctggctcctcctgcagggtacagcgggtacagtcagggatccttgtgagacagagattgcgagtcccccatgccaagggggcatcttcagccctgccctgccccatccacctgcatgcccagttctgccttaggggaggagaagatggactgggcaatcatagacacgggtcactcatcaaggccaccggtgattggcaaagccttggtatatttgctgcagctcctggagcattgggggtggccaagccttggtttcaatgaatcaccctaccaaggccctacatacacactcagtgcacccctcagtgcacacgccccctcccagaactgcccagggccacagcagcacacacctccaggggtgcccttctcgttgcagtccttgcagacggcctccacattgttgtgtcaggtgcaccagccctgcacacgcctgtgctcttggacacacacccacctatttgcccccatgcacacattttccaacagccccccaagccatcccatctgctccactcacagcacaagattaactcagtcctacttcatctccccgggctgttttcagatgccatcatcacagaaggcggggagaatttcagccagggacagaggcagctgttctgcctggcccgggccttcgtgaggaagaccagcatcttcatcatggacgaggccacggcttccattgacatggccacggttggtcctgggcccctccatgggaccatggtcttggaaagggtttagtgggatgctagggagaaatttgcacgaagtagtcctgaggctcaagttgcctctaacatcaaatgctatgtgttgcagaaaatgaaaagagctggggggaccctgactctgtctagtcttagggaatgttacacacacacacgcacacacaaaaacactatgcaaacacacacataagctgcacacacagacccacacagacttcacactgtcacctatcacaacagcacacacacagccacaaccacaacctacatacacacacagagctgagctcccaacaggctgagtccagtccctgagtgccgggaacctgttcagtcctgtggggtgggggtgggactaggatcggggtcagatgggagctgagccacagacctgggctccacatcccccaagccaggccagaccccatccactgggcaggtgagccaacagctgttgcccccacttggcaggaaaacatcctccaaaaggtggtgatgacagccttcgcagaccgcactgtggtcaccatcgcggtaaggggcccattgatggggtgcagagggacacccagggacaggactggcctgttgtggccgtcatcagtgcacagcccctgggcttgcctggtcccagtaatcaagaaagaaccctgaagcaggcagttcagggcaaggggcctggagggcatgcagggagcctgggttgcaggatttggggtggggggttttgcccctgtgcttccctcagacctcccctctccttctccaggttccaaggcctgcccctgtcccaaggccttatatgttaggctggcgttacttctccataggaagtgggggaggggttgtggagggtctctgagccttgaagcctggaggtggggtagagttgggacttggagaggagagaagggtggtattagcagatggagagcttgtagtcacatccaccccaggaaagtgcagtccccacagtgacaggacattctggccacatgcctcatcctcctcctccaagccgcaggagggccaccctcagctgtggcccccaccgcgggtggtattcccaccatcctgacccgccccctcctgccctgcccagcatcgagtgcacaccatcctgagtgcagacctggtgatcgtcctgaagcggggtgccatccttgagttcgataagccagagaagctgctcagccggaaggacagcgtcttcgcctccttcgtccgtgcagacaagtgacctgccagagcccaagtgccatcccacattcggaccctgcccatacccctgcctgggttttcta

SEQ ID NO: 15314 - DNA, 83943 bp, Homo sapiens
agaggcgcggcaggcgcgcggagccagcggagccagctgagcccgagcccagcccgcgcccgcgccgccatgcccctggccttctgcggcagcgagaaccactcggccgcctaccgggtggaccagggggtcctcaacaacggctgctttgtggacgcgctcaacgtggtgccgcacgtcttcctactcttcatcaccttccccatcctcttcattggtgagtgcgcgcagcgagccgcggaggaggggacgggagagcagggagggaggaggaggcgctgcgcgccgcaccgctcggcgtccccttccggcccgcgaccgccgtccgcctcgttcccggggtcccctgccctgtgtcctgcccgccggtccccgcactcgcacaccagctcatcccttcactcccccggtgcccccgatcccgcgccaaacacagcggacgtttgtgacccatgggatcaccaagttttgcttctgcagggccaagagctgggatggggaaaagggaaagaggaggtctcagcacgcagtgggaaactggagaggggtcgggcctcaccctccgtggcgcagcttagggagccgggtcacccctcccgcaaggcagcctccctgtcagccgcagctgggcctagggaagagggaagcctgtgctttggagtctgggatggaggcccagctaacccctatgctttcaccgggctgagccgcgcagtggtccgtgatctctgacagtcccaggcccgcgccctgggcgaggagaggcgagagctagggacttggattcccttcccccgccaccccacccgggcatgtgtctccagagcgcaacttctcaggctctgcgcaaagtagctccgactcgccgacgcagcgaccccggcgcccttgcttgcaaagttgggcgccacggccgggacaatcgtgcgtgcctctccactgaggtcccccccatctctctccaagaccttgactcttccagaccagtcaagtctatcaactcatagggtgtcccctgcatccccaaaacgtgttcattcactttaagaaaacaagcaaatcttaaaattcatatacagctttggggaagaaaggaaagattgtcacaaaattagatttacaagaggttgctgcagaagcagagttgctagttattaacaaagacagttagatagaaatagaaataaaacatacaaaatatgtgctcatatgtgcatcaaaaatcaaaaaagaacagcatttacacttctgttctcagccaaacggtttattaacctgatgacttgtcacacaagaagttagtatgtataatggggtaccttggcagggcacagtggcttacatctgtaatctcagcattttggtgggctgtgacaggaagactgcttgagtccaggagttcgagaccagcctgggcaacatagtgagaccccccccgccctttctacaaaaaattaaaaattagctgagcatggtgatgtgcgcctgtagtcccagctactcaggaggctgaggcgggaggatcacttgagcctaggagatcaaggctgtagtgagccgtgatcgtggcactgcactccagcagaggcaacagagcaagaccctgtctcagtaaaaaggtgtggtgggggaggtaccagcataggaccaggctgaatgagttggacgtttagtttgtgtgtaccagccttggggatcctcatgtgtaggtgtcaccctcaccatggacccaatgcccaagcacctttctggggttcatgcaccctcttcctcctccaagtgggcaggcatcctgcctctgactgtctctccctgcaggatggggaagtcagagctccaaggtgcacatccaccacagcacatggcttcatttccctgggcacaacctgcggtggatcctgaccttcatgctgctcttcgtcctggtgtgtgagattgcagagggcatcctgtctgatgggtgagtgactgtctgaggactcaggaaagtgaatctgctccagggtacttcctgaaaggcccaaggagatcctagctcacctatattccacaagcccatgtcttttgttactacatccagcagctcagtgtcttctatgtgccaacctctctgagctgggcactggacgcaagtgagtcccaggccctgccatcagtccaggagagcagagggaacacggacctgcatgccaagtcccagtgaaataatgctagagcctattagaatgccacaactccagtgaaaaatgtctggcctcttctacaacctgccggagttaccttcttggaaaaaaaaaaaaatctaaccatgccacccactcttgcataagacctttccttggttctcagctgttttgaagatgtggtctcagatcctcagcccaccattcaaggtcttcacagtcagccccacctatctctggcctcattccccatgcccaccttccgtttgggcctcacagcacactcctcacacctctgctacagcacagatcacactgtatgttaaagtttatgtctatttgcaaaactgtcttcagagtcagaaaggcctaagagttagaatctgagtcttgttcatctttgtgttcacagtgcaaggcatgtgataaacataaacattattcagtccataaacatttattgggtccttaggagaatgaatgaaaccatgttacaaataagtactctgggaggtgagaggaaggcagaattgggcaagctccatggttgagagggctttggagcggagtctggaagggtgactaggcttcagacacacagaggaggaaggagagagagaactggtggtgcctgagggaagggaaaaggcaccaaagagaaaagcaggtagggctagggagcagcgcaggggctggagcattaaacacaggctggggagcgatggaggctgaggctgggaacccaggttggggcatctcaggaggactgtgaatcccagcctgcatgtttgggtcggatttggtcagcagtttggaacagaagagagatgtcatcagcataacacttttaggtgggaacctgaggtgttcagcgcaggctggaggcagggagaatctagaggtataatagaagcaggacttagcattgactgcagtagtctaggtgagcaataactgcagacagaaatggtgtgtcagcagtcagggacagaagaggagcgggagcagccatctcactaaggaagaatccagtaaccagcaaggatgagagactgccaggagagggagtggtggaggagagggatatttggcttgagtatctgaggtccagcgccccctgagctggaatcagattatacccagactgcactcctgcagtgctgcctggctcctgtagttggatggcaggggataggctccctcatcctccctcccgttccccaccttcccttccccaatgtccctgcatcctggcttcagcagtgatctctaaaatacctgcttgacttggaggcagcagctctgcctgcttattaaagtccctagaccagcaagaagaccagaaggcatactgctacacaagcacgtgacaagtccgcctccacccccacccctacaccccttccaaagtagcacaaatgccacagtgagccctcagatgggaaatactcaccagatggtgacagagaaagacacctccgcccttggagaaggaagacctgggtcttcagtgagcactgctgctgtgtaccagctatgggactttgcacaagtcattcaggctttctgggcctcataagcatttataaacatacgataaaacattttagttgccaacttaaaaatgtgtgagaaagtataaggtgtttcaaaattatttcaaggagtaaagaggcaagagttttgaagatccctgggcagggtgttggctgttcccagtgtggccattcatgactgctctctggccttatgaaacaagcatcatagtccctggcttgcctgcttcatggggctgtggagggtgaaattcgagcatggacagggtgcagagcccggagtggcagagcactgggtagactgtgtattcccagaatgtgggaaactggaatgaatcggtccagggatgccctcctgctggctgtcagcagcccctcctgtgtgtggctgtactgcttcagctcagtgcaaagggccatctcctccccagggcacagatcagctcaagctgagtaattgtcatctggtctttgtgagctcctacccccaggcctgagtgaggggcaggaaaagagcagacaggagaagtcacagacccttgtgatacctccagtctaatccagcctgggttttcagagctgtctggaaatttagggggcaggtgggagggggctgattaaggcagccctgatttgatttagagtgagcctcatttagtgactaattaagccatcttaaacctgtagggcttcccctcttcctttgggtattatttctttctgtgatgttctgaattcagaacaatcaaaacagtataagttagtgaagaagatattttttaataactacaatattttcccagaccaccatacactggataaagcctgtatataaaactttacctaatttcttaactaattgaatgtgtattatttaacaaagcagctaaaaactattctatgaagccatgtcatgaaatatttagttcaattatggttaatcctcatcttatttcgtcttataaaattttaacatttctacctcctattgcaaaaaaaagcatttatatcagcatataataaaacatgtctagatgtcagcttaaaaatgtgtgagagagtagagggtgtttcaaaattatttcaaggagtaaagaggcaagagttttgaagatccccaggaagggtgttggctgtgcccagtgttgccattcatgactgctctctggccttgtctgtcttgtaccttctatattagtttgaagaccttttttggagaatattcactaaagaatatcaatatctaccatttcattaaaaaagaaatgtggagtttgccttttcaagttggtttgatgcttattgatgttttcagggacccagcctcttcccatctttccataccatcctgtgtgtgtgtgtcagcctatcttccccatggtcacaaggtggctgcctagctccgggtattgcttagcatgagcagagagggcatgctgccgacatgcctctcctttatgacagagatcattctttctttgacatctcactggccagaatacgtggaccaacactggcaaaggagtatggaattgcatggctgcttaaaccaatcaccatccattccctggggctgggtatattgctgctggagcaaacctgtggtcctcctggcacagaataaggggaagatactctttggtggacagcccacattgcctctacacttgcacctcagtcccaccagacccactgaggtcacaggatagctctcctcatgtccttcctccttctctgttgaactcttatgtatccttcaaagtccagcctggtgccacctcctctgggaagctgtccttggttgcccaccccctcctttgtgctctctcagtctctgtccatcggcagtatcacttccctagcctgctgactccaacagttagctctgagcatggcagccccctccataccatcagcttctcaagggcagggacccttggcacactggatagaagtagcctggtgggcaacagcagcactgaggcagcaagctgtagcaggccatctgggaatggagtgggtaccacagggctggagcagaaagggcaggctgggcagatctgataaagtggctggaggccacatagcctgggcctttcgttccaggctgagcagagtgggttttgctgtctgcaggagggagctgtggaagggcatgatcacgaccaactaaggtgaccctcctcaccaggcccagggaagactgaggcctggaaggaggctctggctgcctctgggtcttacccccaggccacagtccacccacttagaggcctctgtgagttaaggtggagagactatgagctggtattgactgctccattccccatcccgagagaggagacaaaatcagtgaccttggaaatgcctcttcgtgcctcagtttcctcaccccataaaatgggagactaagagtacccactcgatggggtttaatgaagattaaatgggttaacatatatcgcatgcttagaacagtgcctggcacagagtaaatgctccataaatactgactctcatcagtttgttatcacagcctctggggagggcgccagtgctgacttatgctgttcgtgttaaatggggctgtcactgggtgagttgtggcatacaggcccctgcactgttcaagagaccccagcaacccttgtgcttagggctcagcacatagtaaggcctccagatcatatacccagctctactccatgtactggcagctctgcccagcccataccccaaatacgcccattaactaaagggccctgcagcctataaagtgatgctataaaggttcagtgttcagcctttgaaattcaaggcctgggctgctctattgcagtacttagcatgtccccatcctgtctgtttctctctcccatctcagggtgaccgaatcccaccatctgcacctgtacatgccagccgggatggcgttcatggctgctgtcacctccgtggtctactatcacaacatcgagacttccaacttccccaagctgctaattggtaggtgaggtgtaggagggaggggcagtaccttcattcatttcttcagataatgtttactgaggactcattatgtgccagctattgctctaaacagtagagatttggaatagaaaaagaaaaaaatccctgccttcatggagcttacagtctggtgaaggaggatagacaggcaaagacagtgaataaacaagcaaacaaataggtggtggggatgctatgaagaaaatcaagctgagtaaggggtaggggcaatgacaatgttgctatctacacaggatggtcagggaagggctgtggtaactgtgggcatgcagatatttgggggaaggtattccctgcaaggggagtgacaagtgcaaagtcctctgatagggatagatttggcaaagatgtcactgtgggcaaagccaaatgagcaaggggaagagtgggaggtgagggcaggcgtcaggagaggagcgagcaagagtcccaggctctgggcctgagagcctgggtgaactgtggcatcaataactgatgtgacagaggagggggaggtgggctgtggtggggataaagttttctactgggggcatatcgagtttgagatgtcacagagacagccaactcaagtgtcaagttgggctttcatggggaggtcaggacaggagctacactttcaggaggtgggccttgtagatgacatctaaagcttgagcctggggctggctgccgtggctcacacctgtaaccccagcactttgggaggccgaggtgggcggatcacccgaggtcaggagtttgagaccagcctgaccaacatggagaaacccccacctctactaaaaatagaaaaattagctgggcatggtggcacgcatcggtggtcccaggtactcaggaggctgaggcagtcaaatctcttgaacccaggaggtggagattgtagtgagctgagatcgcgccactgcagtccagcctgggtgacagagcaagactccatctagaaggaaggaaggaaggaaggaaggagggagggagggaagggagggagggaggagggagggagaagaaagcttgagcctggatgaggtcacctggggagagaagagaaaggctctgggaccagagcttgaggtttgctaacatttagagagactcgggaaggactgcccacttagagcttctgagatgttaaatactgcaggactggggtcccaggcagaagcaacaggatgatggttggtgtttactgagcatgtgccatggggcaggctccatgccatgttccttacattcattgtcccacaggctaattcccccagcctccttattggtattgttaatatccccattttccagtgtggaccctgaaactgagaggttaaaaataataacagtaaatactcactttgtacttactgtatgccaggccccatcctacctatgtgatatattaattcatttaatccttgcaacaactctatgaggtaggtaccattattattttccctttacatatcagaaaactgaggctcagaggttaaataactggcactagtctagctcgtcaaggggcacagccgggagtctagcatctgtgcaatctcctaatcatttctgagactgcgtgtctaagggccctcagacttcgtccttggggtaaaggtatcaatccgcaggtctgcctctgtgttggggttcagcctgtgtgtctaaggctggggctgtacatctggcagttagactttgttcacactatgtccttaagtcagactgatttttaggtatcacagcatcgaattgacatttggagtctggcacactctgtgctaagccagtgacatcatggtgttgtcagggagtacagggtgtttcttgcactagtcacaggtctgcctttctgtagaaggtgggatctgagctccattaggattatccaggtgatccccctacccctagcccaggggcccccacatgagtatgaatgggagctgggggaagcaggttgagaggggagatgttaaatacaggcttcagagagccaccctgcttccatttctgaagtagctccttgtctgtagagaacccttcattaaccagggcctggctgaccagtgtcctctggaaacaccctgtctggacatctgaggagttcattttctcattctccagcaaacacataatgttctctctttaaagcacaagttatcacccgtggatggatttgtccttttctaaggaacaaagactaactccctccattccccttgttggagttatctccccttgaaaggacactccacagagccagaaattctagaacagggaaaagtggaggggacgtgcctgtgaactgcagggacagaaggaaatgggtattgggagaatggccagccctccaaggggctgatgtctggcctgggtatggagtcccacagaaaggggacctgtgatgcagcttacattgtcccgtgagggaaccatgatcctggaacccagatgaggccaaggaaatgttctctgaaaaagtcatatttgagctgagaactgaaggaactaactgggagaagggaggaaagagtgcttcaggcagaggaaacagcatgtgcaaaggccccaaggcagaaggaacaaaacacattagaaaattcagaagaagaagagtggcgtgggtgcaaagtggaggggagctggactttgggttttgtttgcttgtgcccaggctggagtgcagtggcaccaccttgggtcactacaacctccgcttcctgggttcaagcggattcttgtgcctcagcctgctgagtagctgggaatacaggcgtgtaccaccacactcagataattttttgtatttttagaagagttgggatttcaccctgttgaccatgctggtcttgaactcctggccttaagtgatcaggtctcaacttcccaaagtgttgggattacagccgtgagccaccgcacccacctggaaggtcataccacagatgtttgcctttatcccaacagcaatgggaagttgtgtgtgtgtgtgtgtgtgtgtgtgtgtgtgtgtgtgtgtgtggtttaacatgtttaacataaaatttatcatcttaactgtttttaagtatagtgttctgtggcattaagtatattcacagccgggcatggtggctcatgcctgtaatcccagcaccttggcaggccaaggcaggtgaattgcttgagctcagaagttcgagaccagcctggccaacatgccaaaaccccgtctctacaaaaaacataaaaattagctgggcgtggtaatgtacacctgtagttccagctacttgggaggctgaggtgggagtatcatgggaggctgaggagagaggatcagttgagcctggaaagtggaggctacagtgagccaagattgtgccactgcactccagccaagattgtgccactgcactccagcctggacaacagagtgagaccctgtctcaaaaaaagaaaaaaaaagtatattcacagtgctgtgtagccatcaccactatccatctccagaactttttcatcttcccaggttgaaactctgtactcattaaatgataactccccatttctccctccttacagcccctgacgaccaccattctactttctatctatgaatttgagcactctaggtacctcatctaagcggcatcatgcactgtctttttttttttttttttttttgagatggagtcttgctctgttgcccaggttggagtgcagtggtgcaatctcggctcaccgcaacctctgcttctctggttcaagcgattctcctgcctcagcctcctgagtaactgggactataggtacctgccaccacgcctggctaatttttgtatttttagtagagacggggtttcaccatattggctaggctggtctcaaactcctgatcttgtgatctgcccacctcggcctcccaaagtgctcggattacaggcgagagccaccttgcctggcctatttgtctttttatgacttgcttatttcactgagcataatgtcctcaaggttcatccatgttgtagcatgtattgaaatttccttcctttttaaggctaatattctactgtatggatatgccacattttgtttatctattcgtctgtcagtgggttgcttccacctcttgactcttgtaaatagcactgctatgaacatgggtgcattgaggggttttcgacataatcataataattgctttatggagaccagcttggaggagaacaagatggggaggaagtgtggaaaccaatgagaaggctctcagggtatagcgggaatacagaggacgcatgatgatgcctggacttaggtggtaccacagggatggagagaagtagatagagtcaagctatttaggacgtgaaatagacagcatttgttaatgggagaggtgtggggcgagggagaagaatagagggagaaggaggagtaatgggagctcaccagcagcccccatgttatgcctctttccttccttttccctcttctctcatcaggcattcagcttttgctgagtacttctgtgtctgacaacaggctgagcactcagcactgcaggacaggactatgcaaaaaacctctgggcctagtcctgggtgcactgctaattccctgtgtgaccttgcacaagacatccaagctctctgagcctcggattccccacctgggcaggaagagtaagtccctgcctaagtcatagggttgtaatgaagagcaaagcagaccatatctgttaagtgttagggacaagacaagcatgaggcatattttcaagtctcggctcctgtaggcagctctcactaagggctaaagggcttctgatgcctgggatagaatctgtccggcagagtggagtggaggcagggggacagccttcagctgtggaattcctccagtcctagagaccagcctgagctgggggacattattccagtcctgaggcatgagagcagaaggccgatgcttctgccctccatcctaatgtcctcctgcagggacccaaggtggatggcatcgatccccccgggtgagctcagccctgggcgcatggtggggcccaacatctcaacctgtttcctaaccctgagccaggcaggacagatcccagatttgtgcccaagagatgctctggcatccatgcccaggcccacatagggatagagggcagggtgaaagtctctctccctcactcgggtcctctggagaggggctctgtgtcatgaagctgaccttatccgcatctggtctaggagggaggagggaaggagctgccagtgctaaaatctcccccaccctcaaagggggacttcacaggttattgctggttttggttgttggaagctgacagtgatttattggcagattgaagtgagtgtgtgtgcgagaatttaggatagaatctactgatagcttctgaggtttaccttccccaggtcttaaatctggagataataaaaatataacagctaatgtccaaagagcacccgctgcgtgtgaggctcactgcactaaatgctttccatatgtttctcacaagaaccttctaggtagcactattatgattcccacttaatggatgaggaaactaagctctagaaggctaagtgactaatccaaggtcacacagctattatgtcacaggctctgagcccaggtgtatctggctgcggagccaccaccactaacccctgtataacgctgcctcacagaactgtggctggctctttccgtatcccccatgcccctgctccatcatcatgctgtggtgggctctgaactgtgaggacagggatccaggctttcaccctctctctgtccctagctgccagtgcacttgggcaaggtcacatcctatttctgggcctcagtttcctcatctgtaaaatgaaaggctggattgaatgacctttaagatttccctcacttggaaattccacaagtaagtcattatagcatggagcttgcatgcatgggctccagcgtcaggccagcccagctctgccagttaatgggtgtgtggccttggatctgttacctaacctttctgagcctcatttcctttgtctgagaaattgggggtgacggcagtgtactttctttgaaaagttatggtgaggaatagataagatcatgtgtttaaagtgcttacttggcacagtgcctgtaacttagttaaattcaataaataaatttcccattcttcccatgatcatttatttttaagggacatttgtctgaccagtttgatttatgagattattggtgtttttcatgaatgttaagacgtacgtgcgtcatcttagagtcatgtactctgatatattcacacgtgcacatccacttactcggaaatgtacacacccaggcacgcttattctgtctccttctctgccacatacttgcacacattatgtgagtgtacacacatgatgcacacacgtctctgcgatcttccatctctcctcggcagccctgctggtgtattggaccctggccttcatcaccaagaccatcaagtttgtcaagttcttggaccacgccatcggcttctcgcagctacgcttctgcctcacagggctgctggtgatcctctatgggatgctgctcctcgtggaggtcaatgtcatcagggtgagggtaagcaggccacctgggccagggtggggtgggaagcagaggctctggcctctgtcctgccctgggttcaggcccccaccctgcttctcagccaaactgagaagggatcagcttgttttacccgcccgtgtaaaggggagtggggccgtggcggaaatttcaggatagacactgcatctggcccacgtgtgctctaccccagggtcccagagggagaggggggtgatgggtgtgttcgctgaggttggcggatgactttccgtagaaagggaagataagcatcaggcactggcctctcctactttctttcttcgggggtgggggactttgctttaatgtattcatatcgtcacgctggtaaatgaatgagtaagtgttttgttttcctttctgtttgctcccgcctccctctctcttcctcaccccagactccaaccttccccttcccctgcccctacctccccaggcagcccagactaatgaactcgtttgtctttcccatgctttgtttttattagtataataccatatgtgtctgtctaaataaatacctattcaggttttttcctctcaacacaagtgaatatgtaggtttcccccacggtatttatcttgtaagaatgggatcatattatgcagttttctgcactgtgcttttctcacccaacaaatatctcttgggactccctccaagccatctgatatggctaattccgttttcttaatggctgcataatattccatcgtatggatgagccataatgtgttcagctatttctctatggatgggcatttactttgttgccaagttcttgccttcatgaataatggtgtgttgaacatacttatatatttatgtattgctgcttttatttctatgggagagagtccaaggaatggcgttgctgggtcaaagggtctgtgtattttaaattttgatcagtgttacatattgccttccagaaagactgtaatctgccagcaatgagtgagaaaaccctttccctgccttccaaccagcagtgagggctacagccctttcgaacttggactgcctgcatttctctgactcttctgcttttagttggtgatctgcagggcacaaagctccttatgtgtccccccatccagtgaccctcacaggaaccctgtgatgcaagcaccatcccctttatagatgaggaaacattttagatgaggcttgtccaaaaacaccttgctagtaagtggaggaggcaggattcaaaaccaggtctgcatgacttggagttctgtgaactgtatatgaaacatggtggtatccttagatctgtggagaagatagcatatgagagattcctgctcctccccaacccaacctaaacccaacccagcctagccatggggggttcaaagtcgacctcaatgagcagttacaaagtcaggatgccctgacattggtggccaagaagtgttggggaatccttttcctggtaataattacaggcgaaagatggccccatctgttagagatcaagtgtggaatatcacaaccccagatccttgctggggcaaggtagggagtggtgagaagttggacttacccatcccccatggcccatgtgccccacagagatacatcttcttcaagacaccgagggaggtgaagcctcccgaggacctgcaagacctgggggtacgcttcctgcagcccttcgtgaatctgctgtccaaaggcacctactggtggatgaacgccttcatcaagactgcccacaagaagcccatcgacttgcgagccatcgggaagctgcccatcgccatgagggccctcaccaactaccaacggctctgcgaggcctttgacgcccaggtggtcagtgggggcacagccacaccatctattcactgccttctggtttagggtcacagagagggacctcaaagggcattaggtcaaaatcctggtgggacaagaggggaaactgaggctggtgaggggaagaagcttgccttaagtcacacagtgaaccagggacaggtgcagggctgaggattcataggacaggcacagttggaatggcccttaccgtttaggtcgtctagtccaaagtccttatccagatggggaaactgaggctctgagaagggaagtgaccccactggactctcacatccctgtgctctttcctctgcagcttactgactataaaggttggagtgttcacttgatttggagcaggggtgttagtggcctgatccttatggtaactctatgagttgagccagacaggaatctccccatatcactgaggagcaaattgaggccctgagaaaggctgtgacctgcccagagctggccacagctggcaggcggcagaggcagtctcctggctcccagtccagtgctccttcacttcctctgccctcgcaccagggcagttgctgaggcagacacggtggcaggtggtaatgagtgagtgtggcacatggccacctcctcattccagtgctgtgctcatcacatagtccctgaccagctgtgtgaccttgagcaatcatctggccttagtttccccatctagaccatgttggtgttgatagggccctcccaactgtgcacttgctgattccatgatctcttcctggagttcacctatttgcagaggatgtgaccactgggtttccccagacaacaggagctaggggcatcctgggaggctaggcccagccgtgaattagccctcaggcactctgacctggccatggtctctctgggcagcggaaggacattcagggcactcaaggtgcccgggccatctggcaggcactcagccatgccttcgggaggcgcctggtcctcagcagcactttccgcatcttggccgacctgctgggcttcgccgggccactgtgcatctttgggatcgtggaccaccttgggaaggagaacgacgtcttccagcccaaggtaggcagccccaggggtagggtaaggcaccctctagatggttttcagttgtttctgagagtgcaacaggccaatgtgtgtgagccatggccacactggagtggctcctcacacatgcgcaaagcccatagcagtatccccaccacagaatactctacatctggtcaacagaaatgccagagggcgagcctatgccccaagggtatcctactctcctctcaccgtcactaccatagtacctctcccggtagttaggtcagtccgaaaactgcaggaagtgcttttgtttgtccagtgtctagagcttctgtgacttggatttgttggctttcagttcatgtcatcttagtaaactctttaaaagttttcaagatctgtcttcttcagtcctgtaaaggctggcacttgagctttctgcaggggcatcttgggagctactgtcagaggagagagaagtgggaaaccctcacgagtggagctttgtctctccccactccaaatttcattcaaagctgcccgtagttttattaatatgttggacttttccattaaaatttcttttttaagaaaagtttccatggcttaaaaaacactggagacttattagactagattatatccaatggccttggcagttgtaacgattctgcaaactgaaatttgttggagctagaaaacctttccccggggttatttgccctgcgtggggccgtagcatccacttcgggggctgggcagactgtgctctgttgtctgtttccttgcagccgtttaggtttaaatggccacaaaatgaaaactttttcacccctaataagtttcagagttttagtttccaagtgaggatgtcattataacattttaaccacagacagtctgaaaataatgcagagaatggggaattagggtttttaataatttatgacaccctttgcgtaacatttgttcatctcatgagctccaaaatcgcagccagcagttaatcctcaggaggtttatgttcatttttctggagacataattagtcagctgaacagttttggccacagatatgagatacgttgagtctgatttatgcagcaaactttcattgaacactgctgtgtgccaggcctgggttgggctgtgggaatatgaaagcaatagttatgatgaggatgattaacaatattaacagccacttactgaccacataatacatacctggctgtgtgcaggagttatccatgtgttatttaatccctaaaactatcctttggcgtgagtatattttgcaacatctttactgtggtatacctcaaatactgtacagtttatgagatgataggtattcttatccccattttacagatgagaaagttgaggctcagaaagtttaagtaattttccccagggtctctcagctagttaataacagaggcagaatttgaacacaagactcactccacagtctgggcatttacagccaggaagctaaattgactattattatcaagccatcacctctggctccaaggattatgaaatccaacagtgaggagagaaatcaaaataaaatacttttatgctatgtgttacatgtgactcttaggaggaatattcagggaattgtgggaaaagatagtgattaacttagccagtggtcatgaacagcttcatagaggaggggatgtttgaaaggggtcttgacggatgagtaggaatttgccaggctgccatgggaagatttcttgctcaaccaagaatgcaaggaccacttttgcttatttaaactttgatggcttttgaagccatatctggctttttgagcctctctactttacctggcccataaaagagaggggaagcggctgcttctcttgtctacaggagtgtcacctttggctctagcctgaccataggctaccccagaatacccccattggcgatcctgaagcagcatggagccagttgttaatatcagggggaaatggcacaggccagagcccttatcagagtgtccacaccacgctcttcttcctgtgtttcccaaaacccttgtgggattctgctaaggagagagctctgaggcaggacgtgccaaagagatggcgaaagcacttagaattttagttcatctgaacgttatcattgccgtttttttctctttgtttatacacaaaccctggggtttattaccgtctcattggaatgctcttgtcccagttacttagcacacaaatccctgagacagatggccctgcctcagtggcagtgggccttatcagatttaatattttttccctgcagcccaaacacaatcagaaaatttccgacacagaaacaagagttgaaagtaaatatagtctccagtgtccgcaacaaagaactctccatcatgtggttgcctgggatgtggcttaattctcatgtgggcttctgagctcagaaaatgggggaaagggatcatttactgagatcatttggttcatctcccagcccccaagccattctaatccagagagaaccgagtgctattctggtctttatgaatgacaaagaaggaagctccctagctacatgttgcagtgtttcacagtctgggagaggaagccgttttttctgcccagcctgaatccatcctgcagcagttggcacagcgaggcacctgtggtttattcatcatcactcttccttcctaagatactcagagttggcaagaaacatgtcatccttggtatccgcaaggacgaacatttctgatgtcctctttagttactgaaagtgtctgtgacttgccagatctttgatgctcctgtcaccccgctgccactccccagggaaagctgggacccaggttgggctctgcctatgatctatagctctttccagcctcctctccaacccaacccctactcccaatctgtcacctcccatggatgccactgatctggctgaaggacaagagaattagattcataatgagctgctggtgtctgaaacctgccagcactgccctgggctatcagttgagccaaaggaagaaggaacagtctgggtttgatcgaagggctaaagcttcaaacagcctctaagtctcagtaggaaaatgtgtaggtttgggagggtgtatgtgtttccgaatgagttcccctaagaactgcttatggttctatatgtgtgttctgtttgtccctgtgtcttttggtgtgtctttttctgcgtgtgtgtgtgcatgtgtgtgtgtctatgcccccgtttggattgccatatttgtggctatcattatgagtgacttaatgagtgtatatgcattggtgtttctgtgactttgtggttttgatgcatgggctggcctcttcataaccatgtccatgcagctggtctggcctagagtacctgccttcaattcactagctccttcttggccatcaagactctgctcaaatgtcacctgctccagggagccttcacctggttgaattagatgccccttatctgtgctcacataacatcctatcaaagcgccctgtttctttccctgacttgatcctctgtcccctattgcctgacctctgtgtgcccagcactcagcccactgcctgacacccaggagatgcacgggaaatggttctgcaaagaaggaataatgcagcaattactatatattgagtgcttacacttactgttttttcacatgcactgttacattgacttctcataacaactctctgaagtcccttcatagcctcaccttacagatgaggaaactgaagctaagagaggttgaggaacttacctaaggacacagtggctaatatatgatgagtcaggacctctaagtccaggctcttaaccaccgtgtcaaacagtcttgtatgaatgggtaggtgtgttggtctctgggtggccaaagataattttattctttacccagggcctcccggggctgggacctacggacaactcaccttttgacacctgccaaaataggaaacaagagtccaagtgatcccctctcctttaagcaccagagaacatgtgaaggggacctttccaatcatacctctggcctggcagagacaatggggctccaaactgtagagtcgggagtgctgggttttagtcctacctctgcagctaactcatttattctcctcagcagtcacattctgcaagcctcaaatgcaaaatgtgtaataacttctgtagaaagtacatgggggcatgaagatcattggcttgattgcttttaaaaaatcggtattgagcactactggggaaatccctggaaacaaacacaattcttccctgagagcttgtgaaaatgcaagactagggcctatgattttccaaagcattttcttccaccaagtgtcaggttgtaggtccttggtcttttctctcttgccttggtacctgcagggtgctgaccagtgctatcatatcccctccccgtttcctaggaccctcttctcggtagactccaacagggcctgccttccttgggcagcatggcaggcctcttggctagtctagtacccacttcttttttttttttttttttttttggatggagcctcactctgtctcccaggctggagtgcactggcgcaatcttagctcactgcaacctctgcctcctgggttcaagcaattctcctggcccagcctcccaagtagctgggattacaggcatgcatcaccatgtccagctatttttttgtatttttagtagaaacagggtttcagcatgttggccaggctggtctcaaactcccgacctcaggtgatctgcctacttcagcctcccaaaatgctggaattacaggcatgacccaccacgcctagtcaggtacccacttcttaactgaaacttagctattccaggttctatcccttttaaaccaactctttgaagagaggtctaataatgacccaatgacttatagctgcagtgagatttttattttaacaggtcacaaaattctcaatccacaaaagtagatttctgaccctaggttattttgttgggggcggagagaggaagtcaaaggttttgcagcctttagagctgcaaaaccagaatttgttgttttgttaaaaatgcacaaataccgacgagtatatttaagtaacacccatagtctaacgaacaaacatgatcagttggcttttccagccctcattctccagcctgtgtgttttctgctcattgtaacacagcgtgtgtgtggcattccatgtttctccagagctttcatgagaatcagtggtcttggatgcatagtgttcccatgagtaccttaattacctaaccattccctgtggttggaaatttatatgggtttttgcattctccttctgctctgaccccaaaataaatgtctgtgttcatacagctattaccttatgtgaaattattttctttgggataaattctcatgatgtgttgttgctttaaaatagtggactccagtctccagagctgcgtctctgcagaggacagtgggacagaagaatcccagggcatgttaaaaaggaccgggtcttcctaaacccacatgcctatatttctgacccagtaccagccaggggggcaagtttccatcccccacaagtcacaaacctgtaactgacactaggatgcttaaggtcaaaggcctggacgaggcctagacagtgggtctggggtagtgtttttgacatcactcaggttcatgttcacatgttgtccccttaccagcatgtgaccttgggccagccactaaccctactgaaactcctttttttcatgtatgaaatggggctaataatggtaccctcctcattagggtattgtgaggatagagttttgcacctgataaatattgtctcctgccccttcctcccctggaaattcaggtctctccctgcagcctaattttaaggcccatttttctgcttccagcccacccctgcccttctaccttcgacctcctccctctgcctctccctctggtgcactggcaaatgggacagagagcctcggtagggccttcctcttagagtcttgcacgcatccctcagtggtctccctgtggctgcttcctgctgccaccaacagatacagacccctgtcgcacagatcatggtagagacagtggtgagcaggaccagacagctccagggagcagtgagggctggcttagagaacctctgttaaactgagaggccaccatcaggaagctctgatccaagatccaggaatccctgactctagggaaaggcctccaatgagagcctgggccctctctgcctgattctgattgtggatgtgccctcaaactccttctcatcactttgttccatccctctttaccctgcagcagctcccacaccctgccaaacaggatgcacagtccagggcagtgtctgagaaagagcagagatctgtcttcatggaaatattgatgtggctctgctggggagcaatggatttatcaagatcaaagttttcctgggagttattgatgcttaatttggaaatagacacactgttgatccctggtatctttagcaacaaagttaaaatgtttgtttttcttcactggttgccatctgagatcttgccggaagtacacaagagaaccttaaatttaacaggaggccctgggagcccatgaggctggcgggcttgggtctgaaatcttttcagtctcttgtaagtgatgagctctcattctctcctgagagctctacggtgccatgttttccactggccttttctgctcagtaattgctacattacaggctgttggtaagttcggaacaagggagctgctgattccatttctgtagcagagaacatgcaccgtgagacttgttgtaccagttcaggttttaggtgctctatttattcttgccccattcagaatgctctcccctgggtctgtggccacaatgctaagagtcatatttatgggcctgcagttgtaattgggccccattctgttcccccaagtggaaagatgaacagggtgtaagcaaccttccctgtagttagaaaaacgtttagttggatttatcagtctgatttttcactcataaacaattgcacaagcctttgcaagcccagagggtcttgtaataatgatggccgtggtccattatggcacagtgatgtgttctacggtggtcattttgctggcaatgacagtcacctctgaacttctctttccaacagacacaatttctcggggtttactttgtctcatcccaagagttccttgccaatgcctacgtcttagctgtgcttctgttccttgccctcctactgcaaaggacatttctgcaagcatcctactatgtggccattgaaactggaattaacttgagaggagcaatacaggtacttggatgattattttttcactttgccataagaaccattattaggaataatgtccatgagtgttattcatcctcatggacactcaagaataattctgctgtaaatttattttttgttgcccattaacgatgttttaaaacagtaaccattgacaaggcagtgtgggatagtggaaaatatcttgggctgaacttgggagacagtgtagctctggctctggttctgccttggactgggtctgaaaatccagctgctcagcccttggcttgaaagtggtagacgtcactaattgatcacagcactctttctgaccaagggtaaatgcaaccttggaatcctctctaagtggctgttccagagttctgctaccagacagtcttctttgggtgtgaaaaaaggaatgtgcttgacatacaaggtctagatagcctctaagacagggtcccctctaagatggggtattggtccatggcctgttaggaactgagccacacatcaggaggtaagcagtgggagcaagcattactacctgagctctgcctcctgtcagatcagcggctacattagactctcataggagtgcgaaccctattgtgaactgtgcaggcaagggtctaggttgtgtgttccttatgagaatctaatgcctgatgatctgaagtggaacagtttcatcctgaaaccatccctctcccccaggtccatggaaaaattgtcttccacgaaaccagtccctggtgccaaaaaggttgaggaccactgctctaagttctatttgaacccttaagtcttgctcactaatgagagtgacctatttggtctgttgggtcacttaagtctaggctcttggtcctgccttctgtgatttccttcttagagtttctggaaagatgatcaaagccagggagtgttcagggcccctctgaagaaggtgatgatgagagttgtccaagtcccagggtcttcactaggattttggttcagctatcagactagagagacatcctgattgagagtagtttaaatgggatagaagtttgtttattcttcagatagagtcagggctgacacaggagctactcaatgatcagagacctggcttcttctgtcatgttgctctgccagccttcttttgtgacttttgtctccatagccatggtgggtattgaaactgccactatatttacatttaaactagccagaagaagggacaagaggagggaacgcattttccttttaaaatggtaatacctgatttgcacataccctctcgcatcccattggtgagaaagtggccaaatggccgtatctagagagtctagaaagagcttggtctttattcttgacagctatatatgcactgctagaaattctctgtgcaaagaggagaatgggcattgggaataactagatgcagctatgcctagtgatgtccatgaagttgtggtaaaatcctgaagctaccttgttctttggaaatgttcctcagaatcattaacattagtcatgtgggagacaggagaagaagctctgcagaaaagggaccgagaggacaaggatatagcttgggctggggacaatgtcagagtccaaactctggctatcttggaatagtctgtgtgaacggtgccctcccaagttgtgcagtgcacaacctgtgcagctatatatggcaaccctgcccatccccagtggtttctcactgggaaagcagagtatttcctcagggatgtcattatgtgacaatagtggaaaaagcccaggaaaatctaagaccttctaagactcatgggggcccagagctgggaggaaccaagctgttgctcagttcagaaaacttctctagaaatcccagcctctcctcacacccctccagtgacaggcagacttgcaccaccacaagcaacagccacttttgtggttgggcagttttgtaattaaatatactaatgtgtgtatgtcataaattacattttccaattatgccaaaagagccaaaaatggttttttaatggttagcatataatcgtttttatcaaattgcttgaatctttcatgttaataagagagattcattactatgccacaaaaagcaaatactggcattaattatagaaacaaattaggggggtggagcgcaatggctcatgactgtaatcccagcgctttgggaggctgaggcgggtggatcacaaggtcagaagtttgagaccagcctgaccaacatagtgaaaccccatctctactaaaaatacaaaaattagccaggcatgttggcgtgcacctgtagtcccagctactcaggaggctgaggcaggagaatcgcttgaacccagcaggtggaggttgcagtgagctgagatcgtgccactatactccagcttgggcgacagagtgagacttcatctcaaaaaaaaaaaaaaaaaaaaagtggctcatgcctgtaatcccagcactttgggaggccaaggcgggtggatcacaaggtcaggagatcgagaccatcctggctaacatggtgaaaccccgtctctactaaaaatacaaaaaaaaattagccaggcatggtggcgggtgcctgtagtcccagctactcgggaggctgaggcaggagaatggcgtgaacccaggaggaggagcttgcagtgagccgagatggcaccaccgcactccagcctgggcgacacagcaagactctgaaaaaaaaaaaaaggaaagaaagaaggaaaggaaaggaaagaaaggaaaggaaaggaaggaaagaaagaaagaaaggaaagagagagagagaaagaaagaaagaaagaaagaaagaaagaaagaaagaaagaaagaaagaaagaaagaaagaaagagaaagaaagaaagaaaaagaaaagaaaggagttagggagaaaaaaaccctttctttctttcttttggagatttccggaaaatgtacccttacggatgagagcctgtgtcttcatgggttagagaataaccacgctttgtgcataaaaagttattaagcacaattcctgaattatacataattactagctgtcagtcagttgtgcatttctgtgtatgctggtcttcacttaataagactttatttcacagatcacttggtgtccctacttcactgaaactaggtgattatcttttgaagtctcatttcacataacctaggaggtatatagatttctttaaaaatgtcattgccattattttaaaccttacccatggtatatataaacttacagaaagacagaataggttcattattttaaaccttgcccatggtgtatattagctcacagaaagacatagaataggttcctgccttaagaaaacctgacccacaaaaaagcctgggtttacacaaaagaggaattaagggcggggagcccaccttacaacagaatgaataatagaattttatccaagagcaggcatcctgaggacatttaagacccggatgcatttttccttgttcaagagcacacatccaaaaattgcagtctttctgcgagtcatgatcactctgcacataaagcgtttaggttcagagctcggggaggccattaccatggctgctctctgtctgccctgtgagggtccttggggtggctgcactctggggatggtgctggggctgactgactcacgcggtcgtgtaacacatcagaccttccaaagtcgaacccttgttttgtttcaaggctcaattatgacaggacttggtctcagagcagatcccctccctaggctggagaaggccactttaaaacagatggcctgccccacttcatcatttttatggctctgatctgtgttctccactggcctctggtaaatcaagaatacaagtggacatgaagatctgctttaaaaaataaagaacagaccgggtgcggtggctcatgcctgtaatctcagcatttggaggccgaggtggatggatctcctgaggtcaggagtttgagaccagcctggccaacatggcaaaaccccatctctgctaaaaatataaaaattagctgggcatggtaggcacgtgcctataattccagctactccggaggctgaggcatgagaattgcttgaacccggaaggtggaggctgcagtgagctgagatcatgccacttcactccagcctgggaagcagagcgagactctgtctctaaataaataagtaaatgaattaaattaaataaaaataaagaaccaattaagtcctgtctacaggaaaaggccttacttgctggagaagtagcttgctgtgctggagtagactagtaagttggaacggtgatacagtaccaccttacagagctgctctagggcaccatggggactgtctgagaagcccctggcacactgtaacaggtggcatctggtgtggtgatgatgatgagaatgatgatgaatgtgaaacactctgctctcatttctagaccaagatttacaataaaattatgcacctgtccacctccaacctgtccatgggagaaatgactgctggacagatctgtaatctggttgccatcgacaccaatcagctcatgtggtttttcttcttgtgcccaaacctctgggctatgccagtacaggtactagatgggctgaggggaagggaggggggcagcaggacacacaaccagaatctgctggtccatggccagtaactaggagcacaccgtcttccactccatgcttgcctgtacctttcacacacttggctataccacaggctgtacctctgggtccctcctgtcccatactctgcaagcactgaccatctctcttaatgaccagagaaggcagtatcattaagactttaaaaatggagccaactttataaactatagaaaaatcaagccaggttcaggggctcacacctgtaatcccagcactttgggaggctgaggcaggaagattacatgagcacaggagttcaagactggcctgggcaacacagtgagaccccttctatgcagaaaaaaaaaagaagaaagaaaagaaaaatcgtacatggaatgcccacagatcttaaaagctatgttgtagcaaaatatttaattacatcaaaaagtgttagtgatgtatttttaagcaaaaagagtaagttacaaatagtatatgttgtatgcttactactaaactggaatatatgttatgtatacatttgtacagattcacacatgaaaaagaattggaaaatcacatagtgggattataagtgatttttattttctttatgtgtttctaaattctctaataagcgtgtataagatttggaaatcaacaacatgatacttttagcctaggcaacaaagtgagaccctgtctgtacaaaaaattagctggaagtggtggctcacaactatagccccagctactcagaggctgaggtgggaagattacctaaagtccaggaggcagaggttgcagtgagctacaatcacaccactgcactccagcctgggcgatagagtgacaccttgtctcaaaaacaaacaaaacctggtgttttttagccagatgtggtggtgcgcccctttagtcccagctacctgggagtctgagatggaaggattgcttgaccccaggagttcaaggctgcagtgagcaatgatcacgcccctgcacttcagcctggacaacagagagactcctgtctcttaaaaaataaaaataaaaacgttaaaacatggtatttttttaaagcaagacaacctttggtgctggctcaggaagaggtacattaccccccaataatcagaggagaatcgtcagcatgattgatctgacctcgggcttcatgtgtcccatctcccacccggagctcttccaccacagagtctgatcctgtcctatgcctgggactaaatcttcaccctggtgttcaggccagaaaccgaaatcccagacccattcccagagggcgggaaggttccaccgggagagcttgatgtagcagaaagtgacttgggtgagacaggctgattcaaatacttaacctctctgagccttggtttctttatctatgaaatggggaggctgcccaccctctggagttgctatggcaattcagttagataatgtaagtaacacagcaggcagagtggcccccagagtcttcacttcgtaaatatcagatccctctaccttgcacatgtttggtatgagtgaggtgttaccaatccagaatccattgcttcttgggataaagattccataaaccttcatctccagtgatttgtattggtcctccttacttgtaaagcttagagtttaaaaatattaaaagaaaaaaaggggagaggctcccacagggacacagctagacaagatgagatgcagggaatctgatgttcttttttatgggaacagtcatatatgccatcccccattaccacctacccatgcccagactgcccccgctccattctgccaagacagatcaatgactataaaagctacaaaagggcctggagatctcatctagtttagttaccaaccaaccttttatgcacaagactttctaagctgggtgtggtggctcatgcctgtagtctcagccactcaaaaggctgaggtaggaggatggcttgagcccaagagttcgagtccagcctgggcaacatagagagacctcatctctaacacaattttttttttgaaacatgaaaaatgaagatttctgaccatgcttctctcattagttaacactttgggctgtgagggtctgatgcagagagacacagcctgggaggatcctaacatgtacacagcattcaaaaggctacaagacactttctgttgtgtccccttgaacaagcagtttgtaagattttgttggccaggcatggtggctcgctcctgtaatcccagcactttgggaggctgaggctgatggttcacctgaggtcaggagttcgagaccagcctgaccaatatggtgaaaccccgtctctactaaaaatacaaaaattagccgggcatgatggcgtgtgcctgtagtctcagctactccggaggctgagacaggagaattgcttgagcccaggaggcggagactgtggtgagctgagatcgtgtcactgcgttccagcctgggtaacagagcgagactcggtctaaaaaaaaaaaaaaaaaagaaatcaggttttgtctactaaacctgctgcacggttaccgttactagtactcacagggtttgttgcacatgcatcgttgctaatagtgctaactaatattaacagcccttgccctatgcctggccctgtcccagcccccctcccttgtataatttaacccttgcactgggggtagagattttcatatctactgatttcttacctttgctcatttatcatggagtgtcctttggttttctgtgtttgtatatacctttaccacttatagatttgaccagcactcaagaaccagtgttactcctgggagttaatacaatcccagccccatggcaaagaaactcatgtggttaggattctgtgtgcagcctggttagccacagggcacgtaaggctttttataatattgacatgagtgcagaagccccattcccgtgtaagccctgagggctcttgtttcataatctttttttggtcacatgcacacagctttattgagatataacccactcatttaaagcatacaaatcagtgggttttagtgtcctatattcacagagctgtgcagccatcatcacaaatgtggaagttttcatttccccaaaaagaaacccgtacccattggcagtcactcctcatcttcgcccccagcccttggccaccgtttatctacacatacttttgaaaggctagtgaaactttctcagaaaaataaatgcttgctcaaacatttgggctataatttcaggggcttcatgggtgcccccctgacatttatcaagaacaccaggttaaggaatttagctataatggaggcctctgtgtttcccagtctcctgggtatcagaggcccagagagggcaggtgccttaccctgggccacgcagtgaaccagtggcagcaccatactcacacatctcctttctgcggttccccagtgacagagttctcaggaagctttttcatttattttctgagaggagggtaggccatcttgtattgatctccaactatatgccagccacaattctaggtgcttatcataaaggttcatttaatcttcacaatagtcctgcagagtggacagagtccttcagagtgggcattataatcaccattttaaagatggagaagctgaaaaccagagaggttaagtaactcacccaagactgcacagcaaaaggctggggctttgaaactcagggccacagactccaaagactatgtcctccccactatgctagatttttttcctaacctgtgaataggagacaaaatagtccttttatttctcacagttgctttgcacactcagaatccatgatttcttctgcatgagggccattcagacctgtgcagaagagagtaatggaccaaggagtcttgggagcacctaggaggaggggatgggggagcatgaggaggagccagggaacagcagcagctgcagcaccagctcccaccccagcctctgccagtctcttggaggtggtgtgggtgcagacaccggctcacaaggtgccctgttagtgagcttggggtgccatgggagccttcttgttgtcaggcccaacccaagctggctgaagaacaccctgatggcctccatttgagcacaactaatgaaggactggatgccagagataagtccaggagggtgatgctgcagggcaggccagggaagagggtacttcatctctatcatggtcctctgcccatccatgccagcatctaacacctgttaaacactgggaggcaggtggtgaaggggccacttcccagcctctaagatacctcctaagccaggaggcattctgtgattaaattacagggcctcccacttactcctttatccttgaggcggtgctggaagcttaatgccaatctggtgtagggctctgggactacaggaccaaggcaagcagtcctttctctctctctctctctttttagctaaggaagccagcacatctgttctttgagaaaaagccctgtatttagaggtgtctgcctttgaaggcaacctgagaaactgtcatcttggcgctttggggactggccatttacacttctcataaatattcagaagtaggcagtcatttacataaagctaaatgcagaaggaattctcttttcagggaatacctggcagattcattaaaaaaattaaagaaaccaagagcataagaatgaaaagcgaattctcggaccccaggctggttttttctggcatgggtgcagtaactttgcctctttgctcagttatcacttttttccaatgacagtaaccataagccctgagagccagcaaatagaacaaaaggtgctgtcacaaacattgtgcaatctcatctctgagatttccatctggaaaatagactggagagagttaaggcttcaaccagccttgcagataaatgcagttagttaccagcccagcaaccctctgcttgcatgagagcccattatgctaacctccttttgaaattgctttgtttctcctccttccctgcactccactccccaagataatttggaaacctgggcaccaaggcttgtcccactctaggggactggggaaacagggattttgccagcacctcctggcagggcaaccatcaggtcaaagggacctgacccatgaccccttcctcagatcattgtgggtgtgattctcctctactacatactcggagtcagtgccttaattggagcagctgtcatcattctactggctcctgtccagtacttcgtggccaccaagctgtctcaggcccagcggagcacactggtgagtgcccaaaggtgtgtgtgttttgtccctcttcccctccttccctcgacagcagcaggtctcctcccacacacccacactgtcattgactttgactttgactttgagtaggccacttcacctgtccaggcctcagcttctttgtctgggaaatggagtcaatgggggaggaggctgcctcccggtgaggacaggaggcgggcatggcagtgacagtattgacactcaggccttcctctcgggtgggagacggagcagaagcctctcccctctgactcggggacccctgcaggagtattccaatgagcggctgaagcagaccaacgagatgctccgcggcatcaagctgctgaagctgtacgcctgggagaacatcttccgcacgcgggtggagacgacccgcaggaaggagatgaccagcctcagggcctttgccatctatacctccatctccagtgagttcaccccacacagccagccctgggtgctgctgcgtacatgcaaggagagggtgtcagagctcgggtaagagggggtgcagggacagaagcaggaggccttgagattatccgactcagtaggggagcctcaaactggctctgatagctaagctcccagaaatcaaagtactcttcattcatttatccaacaaacatgcatggaaagcctgctatgtgctggacactgtgctggccctcaggatacagtgatgaggaagagagatgaagtttcattcctcatggaactgatatgttattgacagacagcagcaagtaagtaaatgaccacagttttgaactctcctaagaatgaagactttttagtaagtcagactgagctgtcattgccctggggaagctacaagaaagcttccatccacttggggctatgcaaaagaaaaagactagttatccttaaatatcagaagcccaggctgaaggtactcacaggtgtagggactgaatttatattaaccaagtagtttgggaaccccaagccaaggaagaagaaaaagaccaaaactggtaaaagtcctagagtcccatatacttgaaaccattttactgagaatgtaaaacttttttttctttttttgagatggagtctcgctctgtcacccaggctggagtgcagtggcaaaatctcggctcactgcaacctccacatcccaggttcaagtgattctcctgcctcagcctcccatgtagctgggactacaggcacacaccaccacacccgactaatttttgtatttttagtagagacagagtttcaccatattggccaggctagtcttgaactcctgacctcgtgatccacccgcctcagcctcccaaagtgctggaattacatgcatgagccactgtgcccagcccaaaagattttttagaaattgaaattttagttatggaaattaattcagtgaacaatggtcccctggtcagagtgagggcttacggaggtcaggtgatccatggagtcctggcccaagtttatctcacagttggtctcgtggctccgtggacccatcccatggtggttacttcccaagtgcataattgggatgtagatatttagcaaccagctgacttcacactagttccctgacctgtccagtctaagagtcattatggccaagtggaagcccctggaaagaagaaaacaaaaaagaaaccaaaacttactcagtgcacaggttacatgaatgagtatagctgaagagagaatttttgaattagaagacagatgagtggggattacacagaacgtggcaaggagagtaagttggtagaaccattttacagatgggaaattaaggccagaggggagtgtgttcctgagatccctcctgaggttagtagcatggctcggactagatcctccaaagtctcttaactcctggtctcaggctattttccacaaagagctgggggcctctgtggggtgaagaagacttaggacaccatggggcaccattatgaggccatttcctcctaggagaaaaaaaatctctgggctctgaaaggagtagaattagggtaggaaattaagagaggctaccgaccacctcctccaactaaaattggttcttttggtgccaggaagagacacacctggtgggggagggaaggtggtaatggagggggtgctggtagtgtctcccagatagacccatccaacaagtctcatggagaatgagacggtcactcaggtcatctgcgtattcttggcattcttgctgcctagagagagagtctgatggagctaggtggccaccaagctgtcccactccccaagacagtttggaaacatgggcaccaaggcatgtccctgtctaggggactggggaaatatcccatagcagtgttctcacagtatggggctggccatgaataccccaggagtccaacctccctttgtccagctagaccatggtgtcctatgcctcaggcagggaatgtggtccagtcatcagtggctgggccgtctgccatacatggtgcaagccatggcgttttatgcagaaagtcctgctagcatttgattttctcagaatggagctgtgagcatggcaggcaaccactgtttcctggattcttcaccaagacaccccaagttcctggtctctccccgttatcctcatccctgaccctgtggttctcagagcctccaaacacactcaggctaagcactccatagacaggggaaatttggaaggaacatctagggagctcagaaaagccaatgtccctagccccaggcccacttcaaccttctctctgtcagtcctgcctgcccctggaggctggttacatgaagagtaaccccctgcttgtgtatagccccccagttttgtacaggtttagagacagttcccagcagtaggaacagctgccgaggtgggagagggcttctcccgatagccgggggacttcctctcccaggaacaacagggtggggtagagcaggcttgtcgttgctgagatagagagagggaagggaaacaacaaggaaagtgggggcactgggtccccaaggttcctggcacagcaagcagtgaagttggggcagcctcaggtcatgtagtgggggcaggtgacatctgctttgactgctcctaagagatatgtactcatctcctggattccaaactgcagcctgggacatgttttcttatataaacagcatcaaaagatgtgtgagttcccaggctagcccactgaaccctacctagtgggtgctcattgtcccccagagcccccagaagacaagccgtggctttgtgatgggcctggggccaggaggacctagggatatgttgtgaagagctgagaagactctggaaaaaaggggctctggagccaagcaggagcccgcccaggactcctcacgtgtccaagtcacctagggagagaaacagagcagcccaggttggtccctggaagagagcagcggaggaggggaaaggggagagcccctggggagagctttgaaagtcaagtgctgtttgctcagtgtgtttgcctttccgaggatgtgtttttttttccctccgttagtcagcagtgggagggggagagagacgggtggtagggtgcagggtacctcctggctgcaggcatatgctttgagtgcgtgttcatttacctcctctggacttcctgccttctgttaccagggatcaagacacaggtcattaggcgtgaggtaatggggcatctcttgttctgacccctggcgccagtcttggagtcctgacgctgcagaggagccccagagtcacatttcctgttggggcccatcctgctcatatgcggcaccatcagacttctgggcaggcaagattacctgtgactctgtctgatggtctcgccatcaatatcactgagagtagctgtgtatggagtcccgaactggtacaggataaaacagggggctgaaaagggaatgaatgggcacagtttctctggcatcaaaagtcacatccagaattgatatttcctgttgagtaaaaatagaaatataagttgctcagtggatgttgagtgagccctattcatgtgccccactctgtgccaagcaccaggaaggagggaagggaaaaatgataagatgttctccccgttctccaggagtttatgctccactaagaagtcagagctaacatgcacagaacagtgtggcagcgagagcagaaccgtgtggccagctccatgcttgccgcctagcaagcgtgattgcacttcatcctcataacaacttggtgaggtgtgttgctctgttgtcccattttacagcagagaggactgactctcagtgaattgaaatgtctcagtgaggtcttccacagcaaaaggcgaagcacagagaaggaagtccatgtgggctgggagttcacccagagattcatgtaggggcaatgtgggctgtaccttgcaagatggtgggatttcaatgaggagaagacaaagtgggaggaagctggagacaaggactgtggtctcttcctttagaagtcagttcaatctttttttccttgtggaagcagcataactctaggtggttcctctgtatctgaggacaagctttgtagaggtgacaaaggggtcctaggtcctatcaggcaagcactcgatatgctgccagttcattctgtccattgtgagatacccattccagagcgcttcctctgtgccaggctctacggaggttctggatgttaaagaggaagcaggcatggccctggccctcccagtcttgtgggagattgatcatgcccatgaatagtgaccatgtggtcagagccacagggtcaattccaaatgcccctgtttctcttttgtgttactcacctgactctgggtctttcgtttcttccattcattttttttaaacaaatatttcctgcccaccttctgtgtgccaggcctggggatgcagtgggagaagcctctgtcctcctcagtggaggcgctaactcagaacaggcagtggagaaaaacaacatgacctggagacctggtgccccttccttccccagcatctttgaaattcttttggttgttgttgttttgagatggagtctcactctgttgtcaggctggagtgcagtggcgcgatctcaactcactgcaacctctgcctcccaggttcaagtaattctccctgcctcagcctcccaagtagctgggattacaggtgctctctaccatgcccagtaatattttttgtatttttagtagagacagggtttcgccatgttggccagcctggtctcaaactcctgacctcaggtgatccacctgccttggcctcccaaaatgctgggattacaagcatgagccactgtgcctggcctgaaattcttcaatatctacctgcccttctgccagttggtgcagccacagtgggctgcttatgcatatcctggcctggcttggtggggagcatggctgagggagagccggggcacccatcaattaaggaggtaaagatcagtctgactgagatgcctcctgccacacttcctcagctgccagcaactgacaccattaacctgatttccttccccctctgttgactgcactgactattggactgaatgggaaacagccccgtgcacctcaaaatgcacttcccctcctgcagatgcatcttgcaattaggcccaaactgtgagcctgcatgctcctcccctggccctgcacaggcaacaaagctgaagttaatcagaggtacaaatggctggctatgcctctctgacacgtaacttctggaacatgtatcaatgctttggaaatgaaaagctcctggtattgcaatgccaggctggtgcccataagggccagaaaacattccttgggcaaagccagggggagtgggtgatctgatcccagctcaggtttgttgatttgttgttttgtttgtttcgttttgtatggggcaagggttgagggtatgaaaaacttacactatcatttactaccgtagtccccagaacccagcacaccagcacaaggcctggaacagggataccttttttgaatgaataagtctttttttttttttttttttttttttttgagacagagtttcactcttgttgcccaggctggagtgcagtggcgcgatctcggctcactgcaacctccgcctcctgggttcaagcgattctcctgcctcagcctctcgagtagctaggattacaggtatgcgccaccacgcctggctaatattttggtatttttagtagagatggggtttcaccatgttggccaggctggtctcaaactcctgacctcaggtgatccacccaccttggcctcccagagtgctgggattacaggcgtgagccactgtgcccagccttgaatggataagtcttaagggatatttttggaaaggatattctaaaaaatacccatgtctctacactattgcagaagggctttcagttttgatggcagcctttcaggccagcctacacgcaactaaacttttccataacagcatcacacttacacaagaagaaggttttataatccacttgccattatttaacatagttcttcctccttaactttcaagatctgagcactataatgttcttctttttgtttttgtttttttctaaatcaaattaaggtgagtcacctcaccttgggcctgagttggacagaaatctattcttggctatattccccacccctccaccaccttggaaccttatagaactttatgtggttcaggaaaatgagggcgaggcctcagatcttcaacccatgacagctgtatgcccagctccctgccttcctgtcttacccccagctagggcacaggactgactattgtgcccagagaggtgccagagcctgtaacaaccccagacttcccaggtccagccacatccaccccagagccccaaaagatgatcttcagagagacctttaaaacacaagtagctggtcacttccatccagaccagaacccaagatggctgtgctcttgctgagacatgttggttgtcattgcctccgagcccactttagccctcagctctgtaccagaaatgctgttcctttgggaatcacagccaaagaagagatggagcagttctggaataagaacacaagttcaaactgtcccatatctccccacatcactatctacagttggtctcttcccatggcgatgtccatctgccaccgtggcactggtattgctttgagtgcaggggtctctctttttggcatgttggccctgttactccctgggaactttgagtcttatttggaatgcgtgaagtccctgtgtccggggccagcactgatccacacagctaagtttgcactcatcttccctctcatgtatcatatctggaatggggtctgacacttgatgtgggacctaggaaaaggcctgaagattccccagctataccaatctggagtggttgtcccggttcttactgtactgtcctctgtagggctggcagccatgtgaagaacagaggttcccagcatcatcttcctacacattattacattcacccatctttctgtttctcacttttatctccagcctgggaaaagttctccttatttgtttaaatccttttgtgcttttagatccccttggagcagtagagtaccttgtagaccataagagtggaaaagggtctagttttctccttgtttctaaagatggggtggctgaaaaaactccccttttttgcctacagcttgcctctctgggcctagaagtggttattctgtctccatattggcctttgatttgtgctgagggtcagcttttggctccttcttcctgagacagtggaaacaatgccagctgtgtggcttctgccctgggggctgggggtgaggctttgggtgccactgcctgtgggttgctggcttaaaggacaattctgttcattggtgagagcccaggccattaacacctacgcagtgttattgaaagaagagaggcgggggtggaggggaattagtctatcccagctagagggagataaagagggctagttagttcttggagcagctgctttgaggagaaaatgtatagcttttgacacaacaggaagatccagaaaattatcattgaacatattaaaggttatttctttttcttgcaaaacacacacacacacacacacacacacacacacacgcgaacacacgcagctgatgattctactctcccagccccagccctgaaggggacccagaactccctgcacaaaggctgtccttcaaggggagggtgaaagaagtggaaaatcacattttcattctttagcgtctccatacaacagccagaactgggcagaagctaattatatcagaagcatactccatgttgctgcatcagctttgggatgttcatttttaaatttatttatagcttgtctcattcctcaaaggagttcagggagctacaaaaataaagacaataaaattgaaaaaaattaaattaaaaaaaccatgaccagggaaaatgtgcagtagaatgaagtgtcaattatcacgttttctgactgcaaaatctcccccacggctgatgcaccatcatttactacaacagcccctcttgttggacatttccagtttatttcgtttgggatggtttgttgctgttgctgtggttgtggttttgttttattgaattttgtgttagctgcagctaataccatcttgctgatggctttgcgctgctcttgaatgattactcaggataaatttcctggagacggattataggatcagaaggtctgaacttctgtgtggctctagctacaaagcaccagattgctttccaagagcgttgtagcaatttataatccaacactcagcctattttttggctgggagtcaagccccagaatgtgaaggaggggtcttggcctggagcaggggctgagggatgggtgcacaggacccctccttattggttatttatggggatgggccaggaggagcagaatagaggcccctgccctcccagttgctccttggagtgactgaccccataggggaggggcgaggctacctcacatttagaactatgtagttggtgatggtcaaggtcctaggtctgatgggcatcctcctccctctcctcctcagccagtaatggctgcactatgtcgtatgtcctagatctgggtcccttttgctgtgggaacaccaataatacttacgctgtttcctgccggaaacggtgcaggagggctgtggcatggtagtgggccctggaaaccatctagccttcatgaggaagggcagttaaagcacaggcatgtatgatgttggtattgattaaaagcctcacgggcagagaaattcgccatctgccagggccccagccatacgagggctccagccatacatcctccaggagactgggacctctccaattgcaggagccttgccttccccatcagattaggaattccccgaggatggggacaatgtccttcccacctgcttgagaactcctaaggggcatgtactctgtctccccattgtatctggaacttcctgggagcatagctcctgtctccgtcctcagactgggaatcccctaagggcagaggccatgtccttccacccacttgggattccctgaagttggggaccacatctctgatgtacaatgctttgtatgtactgactgctgcaggattcttggagtaaatgggcagtcaacttcttggactggtattgaccatctggacttcatcagagtgtccaagactttgccattcattagacaggggccatgtgcacaggcagagccctggcctctggcttctggctcctgactcctggtccctctgctttaatttggctaatggcagaaccagactcctttctgggctgccctggaaggggatccttgaatgaaagaggatagatgggaaggtggcagctgacatggttacctcttatgccatgggggggctgctctctctggaaatttaggcctggggtcagggcactgttgagcattttacaccctaggccagaggaggggtgacctgtggagcagggctaagctagtagcccatgaggtatgatgtgtaggcagcacctggggctcacagagcctgttacccatgttatctcctctgaccttggaaagagctggggtgtatgaacaagtatttataagtttacaaaaatcatatgaggaaactgaggcacggggaaggtaaatgacatgccctaggttacacagcttataagtagcagggattctgcccttctgtcacaccaagtcccactgtcttttcttcctggagtccctgtgactgatctaaaggccacatgtttaacagaataaggaggaggcctctgttgcagcaaaccagctaccccacccgcacacagactctaagggacatcctgctttaagctgtccttagttactaatacctcagtgagaatgagtttgaaattttctcaagagccatgggagactaggaagtctctaagcttcatagagagcctggcttggggggacacaggagccaaaggcagaggaagaagtggcagctttgtgcccccagaaacacgtgctcctgacctcacagttggccacagccagccaactctcccatccttctcccaccactttcccgtggggctaacttcaccctgtccacacggagtgacttaacagtttaagccccagagtcgggggccggggtacctgggacaagagtcctgagggaaatggggtgaggaactggaagtgccacagggctagagttctgcccctagcctactggagctgtgccccacaggctggccccactggactgcgctgcctccaagccatcctgggcatctccatgtgtagctgtcacgctcctcccactaaacgcctccctgtgcttcctctgcagttttcatgaacacggccatccccattgcagctgtcctcatagtaagtggatcctttctccatctcttgggggtagggtggagggggagggcgtctgcagtgacaggctgcccagatttggcctttctgcacaggggcctcagaagacaggctccacagccagactgaaaataggatcgaaagtttatagagggtgtggcccctccccaactccagccgaacaggggcctctgcctccaggcctggaagaccggaggcttagtatttagagaaattaaactttcttttaaaaaatagctatccaaatttttaatttttaaagtgaaacatgtgtattgtagaagtgatgggaaatccagaacagaaagctcaaagagaattaaaatcacccataatcccactggtaacatttttaatgtgtttctttccagtctttttttaaggcctatgatatgtcattttctacaaaaataggaatgtgctatgcatgcagttttgcaacctgctcttttaaatttaggaatatgccacacacaattctccatgccactgaatattatgatggtggctttctaaagcaattttgataaaagctgtgtgtgagctgagccatgggggtcaagcagcatgctcctacagaaaggcctgggcccctacgagcctgcagccccctcacccagcctcccatccccatcttctgtgatggctgcagttccttaaaaagatctgcttatttcccccggggccagtgtccctgagctgtgtagagttcacagcctgtcggatacacttgggaattcacttccaatgtgatgtattgagctggttcctggcctggctcctgggggaactgtgggtaacagaggccactgagccagccaggtggctggggcaaagcactgtgcagtttcgtaatcactctgtttacgttatcccgatgaggactggggagatgagcaccccgcctgctgtctgcagagggggccgtgctgacctaacccgagatctcctccctgcttattcccagccaagactgggcaggacagggagtcttggccaggacagggagggagcagcccctgctctccagcttgaagtcctgaacttgttggggacgtttccatgagatgactgtggggatgatgaaggtgtctccaactaaaagatcctcttaggagcctgctccctgacagccctctcatttcccttccagtgctgagcgtttccagtgtgggagggacccacaccctgggccaccctggcctcacttgtgcctctgtccacagactttcgtgggccacgtcagcttcttcaaagaggccgacttctcgccctccgtggcctttgcctccctctccctcttccatatcttggtcacaccgctgttcctgctgtccagtgtggtccgatctaccgtcaaagctctagtgaggtgaggggagggtccgggcgagggcactgggcaggcaggtcctgtgtcagcctcaaggcttgctcgagtgatggccaaaccacagctgtttggtcccggaacacacccccattgctgggccttgctgtagctggtcctggttggtcagagggacattggcctgtatggtttcccagctcgccatccctgagcaaggacttgcttacatacctcccaggagaggggactcactgtcactttcacgacaacttaaaaaaaaaaaaaaaccagtgttgagccaaatgtggaatcctcctaaattctacccactggtcctaacttcaccctccagagccaccaagaatgaggccatcccgtccccacgtggctgccccatggatatcagaaggcatccactgtgtctatctttcccaggccaagtatcccctaccctttccacagcccctgagccctcacagcctcagccagtgaaacagcttcccccaagcgctgggtcctgctctgattggcccacagctcttggaggctcccacttccaggctctagagcctcatggggactctgccactgtcccagaggcattgccctcttgggaatgaaagcctgaaggtagaaggctgaggctttggctgggaaatgccctgtctggagtgagaagatgtccttgggcctctgaagtagctctgcctccttgaaagcaagagcctgtcatgcctctatggagggctggcttgtccttacccatggccagagaaccagtcagtaacaaatgtcctctgtgtcttcagccttgaggaaggtgacacccctgtctcatgggaccctggcaggtactgggaagctggaaggaaggagtagctgttggaatgaagtagctgatagagagggtagcttgcagggggagactctagcatgggttcaaagatggaatggggcataactcagcaaaattatgctctaaggagtatctgaccaggcagtagctggttaaacagggattagctcccatttccacagtcggctgtgctgactcagtttcttgaccagggtgttgtggggtctgaagatcacccctcctcccaccacccactctccagccctatgattctgtgtagaaaccacagatttaagaacgctgcacctgcctgaaaactgttgcactgatcccaaagcgttcatattttcaaacactctggatcccactgtttccaggaatggaacaccagagtagcagaggccttttcagtgaggcagctcaggctctggctgaaggtgggcgcaggacactacctgaagcttcaccccaagagatgagggccagctccactcttcccagtcaccgcctgtgggggagggaggctggacagggcatgaaggcagagcctggtggtctgcccctcccatctaggggtggcgcacagaaagggagactccaggccacagctcacttacaccccagaataaccttgccttgagggtgggatggcttgtctgccccaggcctgttggacatttagcaaaagagaagaaaggggaatacaaacaatcctgagcttcccagaaagctttcacacctccaggatgggagagaatgaactagaagagtgaagcttccagtgcttcctcaggtccacagggaaatctggacaggggagagggtaggaatagccgcctcccccgtgagtaatgacacctcctccagcaggctgttatggggatccgattacataatgctacaaaacagttaacacagtgtctggcatttagtgtatgctcacaaaatactagctattgattctttaccaatcctagtcctaactaaccttaaccctgaccaatccaacaccaaccatccttcagtctaataacccagactaactaacttcaacattaaccctaaaactaaccaatctcacctccaatccagaccccagcctattccagctgactggtcaaccctagcaaaccctggtaacaccaattacctgcccccatgcccactggtctgcccccttcagtgtgggctttgtgggactatacttcaggcctgagatcctgctcagagctctctatcaggctgcgccctctcccctcccctctgcccctggcaggggtgaggggtgtctctgtgcttcccgagcagcgtgcaaaagctaagcgagttcctgtccagtgcagagatccgtgaggagcagtgtgccccccatgagcccacacctcagggcccagccagcaagtaccaggcggtggtgagtgcccggcctccccttgctactcccagcatggtcctctaaggcccaaaacttgggcctgctgtgtcggacttctgccttttttcccaggaagaggggctcccttccctacacagctcccagcccagtgggtcctcacctccaaaccacccccagcccctcagggttgtgaaccgcaagcgtccagcccgggaggattgtcggggcctcaccggcccactgcagagcctggtccccagtgcagatggcgatgctgacaactgctgtgtccaggtgagtcctgctgccccatgcctggccacccagcaccaactcccagagggagctcagcacctggaaagccagaaagctgcatgcttagtcctctgcagaggtcaccctgcctgcctgtacggtccataggagtccagaaaccagggaccaccaagtggggggacccccagccttaggcaagggtcagcatgagaaggccagtctcccactcccctgctctggaagtgatccaggggctggaatcagtgtcttttggctttcatggaggaggggaagccagagactattcactgggaactggctgcctttctgttctctcctgggcggtgggacacgcctaatgaagatcatgggaggctacttcacgtggaccccagatggaatccccacactgtccaacatcaccattcgtatcccccgaggtatggcccagtccacccctccagcatgcccctccccatgtcccactgaataacatagagataaaaagacaaagctgcatttattgagcacctactctctgctcattcttggtgtatgccctgggtatattatagaaggggaaggctacattctagaggcttccgtgtgctgggtgggagtgaagcactaaggacagggtaaaattgccagccttaatgtcaaaccatccattgcagacagtataggtaatgcacaaaaagatcagaagtgggtagccaaggaacgcaagtggaagtgatggggtttctgagaatggacaaaggccctgaggccatgaggcaggaggattttctggcagaggcagccatgagcaaagtatggaggtgggttggaggtgggacccaggatggtgtttcttgggaccacaaggagcctgggctcatactaggagcatgggaaaggagaagcgagtgcttaggaagggtggcggggcaggaaatcagagagggggaaggacctggggagccagaggaggatgttgatttccagaaggaaaggattaaagagggagaggacttgctggggattctaggtaggaagaaagaaaacaggggccccagggttgggtgcatctgtctgtctgtctttctgggtaatggttgttcagactcccccggccccactcacatctgccaccctccctccctgcaggccagctgactatgatcgtggggcaggtgggctgcggcaagtcctcgctccttctagccgcactgggggagatgcagaaggtctcaggggctgtcttctggagcaggtaatacatgtatcctcagggcccagtggaggggaaatctccttttaaccatcctcctcagttgaggatgcacacacatttattggagggcccactctgtgttcagtgaggactcaataaatgctgctaatggatattctcatcatcatcactagtacgtattcacctcttactatgcgcaggttctttgctaagtcctttgcatgcattatttcatttaatttttatgataactaacaaggtccatactgttctcaattctcatttatagaggaaggttaaactatttgtcctaattcacacagctaataagtggcagagctggaattgaaactcagttctgtcagactctgaatcccatggttactcagatgcacggcagtaatttcccagtgtgggaaattgcaacaccaacattggtttccagcttggtcctgagctgcactgacctacacaccataagtgggtgttctgaagatccagatgtaaccaataaatgttggtttctgggcaaagatcactgtcttaattaaagagccagaaccccaggctcagtcaatcacgaatctgttatttatacccacctacttccaagaagcacttgaaactagttgatgaaagattcatgtaaaaatcaaaaccacaatgagataccatctcacacccgttagaatggtgatcgttaaaaagtcaggaaacaacaaatgctggagaggatgtggagaaataggaacgcttttacactgttggtgggagtgtaaattagttcaaccattgtggaagacagtgcggtgattcctcaaggatctagaaccagaaataccatttgacccagcaattccattactgggtatatacccaaaggattataaatcattctactataaagacacatgcagacgtatgtttattgcagcactattcacaatagcaaagacttggaaacaacccaaatgcccatcaatgatagactggataaagaaaatgtggcacatatacaccatggaatactatgcagacataaaaaaggttgagttcgtgtcctttgcagggacatggatgaagctggaaactatcattctcagcaaactcacacaggaacagaaaagcaaataccacatgttctcactcataagtgggagttgaacaatgagaacacatggacacagggaggggaacatcacacactggggcctgtctgggggtggggggcaaggggagggatagcattaggagaaatacttaatgtagatgaagggttgatgggtgcagcaaaccaccatggcatgtgtatacctatgtaacaaacctgcacgttctgcacgtatatcccagaacttgaagtataataaaaaaagatgcatgtaaaataaaaccctttaaaaaggtaagaaaataggaactgagaaatgaagagggtaaaaagatgttcagcaacctgggcagaggacaactacagccatcaacataaaacctggctctgtgccctctggtagccaagggaaaaagggatctctgggctttggagtattcatttaggaataaaagttgcagccaatcagcagaagggcaagctttccctaccaatcatttctaggggaaaattattgaaggtgtcaggtttttcataagcatgagtacagaactgagcagggagaaagactttgggcccaatgtctgaatatcaacatgcacccccgtttcctgcatttccaagatgtccctgaatggtgtatccaaaagatggcaaatttccctcctcagtggggtcgtgggctagcagatgagccccttgggtttcccatcacctcccatcagggactgtgatgtctttgggggcagaggggtctttgcctccattcgccattttatttgggagatttttcaacatagcctgactgggaaggcccaggtattcggtttgagatcatattgccttattccgactgcctctccagcctttggagggaggagcccttttctgctgtccaactgcatgcctgcagcaagaagacaagagtccccagtgcactgtgagctgaagaaagtaaccaatatttattgggtacctcctatgggccatgccctttgctaagtgcattgtcaacatgatctcatcaagcctcctactaagtttaggaggggagtgttgttaccccatttcacagaagcagaaactcaggctcagagaagttgggtgacttactagtcagtgtgtggagcagagactctgcccatgttctttccctcaaacctggtcactgctggggcccccagggcctagtcctaagggttattgtccaagccccatgtagtggtcaggctggatctgggctctcctccaaggcagggcttttccagaaggattgcagggctcagacactggagctgcccctgccttgacctgctcagcatggatgtcaaaacccactctgaacctggtccctttgccctgctttcttctcctcccccaccctcatgccctcatgtggcatcgtgcctgcctcaggagctctccttgtcctatgtagatgaagcaggcatgattggcaggggtctgctctgccctgcctcagtccccacctcttctccaagctgtgccaaccctccgggtctgactgctgcccctctctcttaggaaacctctgccccagcccagggaacacaaggagcctctccaaggcagaggaccctaagcacttcttttttttattattttttattttattttaggttctgagatacatgtgcagagtgtgcaggtttgttacatagctatacatgtgccatggtgctttgctgcacctatcaacctgtcatctttttaagccccacatgtattaggtatttgtcctaatgctctccctcctcttgcctcccaccccccgacaggctcggtatgtgatgttcccctccctgtgtccacgtgttctcattgttcaactcccacttatagtgagcacatgtggtggttggttttctgttcctgcctaagcacttattataggccaggcactgtgcaggcacctcatcatctcagtcagtctgcaccgaactctgtgcagtagatattattatatcctcatttatcagattaggaaactgaggtgaagcaagttgtccaaggccacccagctgttaaatggcagaagtgggatttgcacctaggtgctcaagtgcattggtttgccaccatgtgctcaaagagaaggggcacaagagcctcatgaagaaggcatagctagcctgacagtccaaaggccagcagccgctgtggccatgactcacacacacctgcctcctcccagaactgccacgtgggtcctcacagctctgtccttatcaacacttactctcctttacaggtagcctaggccccagctcccagctctgttcgaggctcgcagaggggcggtagtgaaggggtctcatttctccaggatcctctttgctctctcgcccggtcctggtccagcttccctttcaagcatagtgaagtgcatttgttagcttgcagccaaccctgggaaatcatgagaatttgttcccaagtcaactcattctccagcgtccacagtgacgtattcactcacccagttgagcgcctagtgtatactagaccctgtgacagcaacaggagtgcaaaggtgactaagacgtggcccctgctttttttttttttttttttttttgagacggagtctcgccctgttgcccaggctggagtgcagtggtgcgatctcagctcctcacaagctctgcctcctaggttcaagcgattctcctgcttcagcctcccaagtagctgggactacaggtgtacaccaccatgccggctaattttttgtatttttagtagagacggggtttcactatgttggccagggtaatctcgaactcctgacctcatgatccgcccgcctcagcctcccaaagtgctgggattacaggcatgagccaccacccctggccggccccgcttttaagagaggggagagaagacctgggccttagaagagctcagaggaaccacaattgactctgcagtcaaggagaggaggctcactgcggatgtggtatttgagccttgaaggatgagtgtggtttcatcaagtagaaaaggcagggatgggaaagggaggtggtccaggcaggggtgatggtgtgggcaaagccttgctgatattaaagaacatagttctgtgcacctggaacactggatgcatggggtgcattatgaaagatgggactgaagaagtgaacttggcttagatcccatgtagtaggtctgagaagtaagatttaacccaaaggttgcaaaagaaccatgcttgtgataaaggatgatggattggggaaacagagaaaaagacagacagactgtaggaagggaggtattagcaaataatcataacacagtgtgaggtgtgcattaatattcactcattccaagtattgatcaagaagagaggtaggtactgggttaggaaacagcttgggcaaatgcatggggaaatgagagatgtcaagatgcattctaatggcagcctcttgaagatcttaagttgtttttggttcactcatttcgcaaatgaattcatttagcaaaagcactatggatacagtgcttacctctaggaagtaagttttagcccaaatgctgcagaaggatcatgcttatgacaaaggatgatggactggggagagagaaaaagaaaagacagacagactccaggaaggaaggtcagtctgcagctccttatagtggctaggagaaggagtctaggcagatacgactcaattagcttcatctgctgtttgtctctcaaaatctagacatgtgcactgctctggctggcccacctatcctgggcattgagttaagtgtgggggctgtgtgttgagagtccccctccattactggcaggaactccacacctcagacattgagccccaggtctgcagggagaagacgtgcttgcaaagtgagctaaaagcaaaacagcctctgacctggcaagcattcccaagtctgcacgcctgcagccagaggagagggtgatgccaggctgctgctcagatgcttttcagccatacccaggccaagacctggtgaccaggcagccagaaggagttccaggaggcacaaggcaggaagttgggggattaggaggtgtagaatggagaatgctctggggagatgggtgctttgttggtgcaactattcgtttattcctccagtgaccacgtgagcagtatggctgcacacacaggctctgcagccaagctgcctgggttcacatttggtctctgtgctttggaaaatttcataagctttctctaccagtttcccttattacccatgagattgatgtgaggattaacctagcatgtagtaaatatcctataaatattattattcaatagtgtacttctttgccaggaacaaaattcacctgttcctctttaaatgtcctccagtctgtctcctgggaaagattcttgtgagctccctggggacagggaccatattttgtttgtctcactgtatccgtagtgctttttgctaaacgaattcacttgctaaatgaatgaaccaggaacaacttaagaccttcaagaggctgccattataatgcatcttgacatctctctcctttccacatgcctttgtccgagctgtttcctaacccagtatttcactacccctcttctccatcaatatttggaatgagcaaataccgttagtgcatacctcacatggtattataattatttgctaatgcgtctgtctcctccatgactctgagctccttgagggattattccatgttgtaccccaggtgccccatgcagatgtgtattttgtgcactgttctgtgtaggctacaaaggaaaaggcctagcacctgcccttggggagctcacccacccaggatggacagaggtgtgcagacagagctgcagggtgggcacaaagggtccatctgctgaagtcctgcagatgcagccccgagcttgtccctcacgtcagcagcctggctcctggtctcagagagaactgtgtggttcccaagcattcactttaggaagaatcacttgcccctccctggctctctgcttcaaggaactgtgacaaccttgggatttgcaaactctctctttaatccttaagaggaaaatgttttggtaaaaagtcaagattagcagatacactcgggtgaaattctttccctggaaataaagaatagagccattaatatccacagtagagtgactttaaatgcccccggggggtcagcaggaaccagggccctgaggaaaggatcagcgtggggaagaggctcccacttccctgtgaggagctgcacatgcagtctcactggagctccctgctgcaatgctgttgcctgtggtggttggtgtggatgctgcctgccaagagccctgattccccaggaagagagaaaaaggcttctctcaggacggccctggtcgcatctgcctgtacaattcctggagcctttggggagctgaagtcaggggctcaagtgcccctgggtttcctggaggaggcaggtgtggtgagacagctgacagacaggagaagggatgctctgaggaagtgactgtccagccatgggaaccagatggcccctggctgtagtcctgatgctgccacttgctagctctgtgaccttgagcaggttacttcacctctctgagacagactcactgtctggacaatgagtaaaaccctacctttcctgtctcagagatttggcaatgggacccaatgacatcaattggaaaggatgctgtgggtgaaaggtaacctttcaggacagcgacaagcctgtctgggcaggatgaatgggctgtggagccctgtatatcctagctcactctttgaacctcagtttccacttcttccctttttatttattgccggggtcttaaatgagtgttgggggtatctgattctccctctgcctgtacttttggggccaagcactgagctgaaaagacaattcctcctagttctccaagcctacaacctgccccctaaccagctgtgagctgtaatacattctccagtgtcactgtgaggtttgtgccttcacccccattttatagatcaggaaacagaggctcctccaagtaaaggagcttgcctcagatttcacagccaatgagtggaaaagcctctgggattcaaatgtcagagcccatatttttcctacttctcgcacctgttatcatatgctgcctcttcctttaacctgcagttccctcccttcacctccaccgtctcaatccttcccactctttaaggttcagttcagctatgacttcttctatgaggctctactcattttctcagatttcttcctcctccaaatttcttgtaaaaattatgttttttctctgattctaaaagaatgcacattacattagaaaagatacacaagcatacagaagataaaaaccacctaatatcccatcacccagaagcttccagtttttctttatgcatttgcatatgcatttgtgtttacttttccccaaaagttctccgatactttgtcctacttttcttttgacccttataacttcctgacttcggtacctttctgatttgccctaccagagtgtgagcccctggaaggcagcctctgcaccctgattcaggttgccacacatatgccagctcctagtgggctggagggaaggacatgcggttggggaactggaagactcatgctttcagctgtgtgcttcctccctagagtgcaggcagaggaggaatcgaatcccctcagcactcttgtaaagaccacagcaatgagtgagagatggtgcctgccagacataccattctttacttttcagcttaaaacagatacaaagtttggggaggctcactggaggaggcttggggctacactggaaagagaagaacttggattcacaccccagcttcccctcttcccagctctgtcacatttgcaaactctgagtctcagtatcctcatgtgtaaaatggggatagggtttatagggttgtaaggatgagatgatgagttgtttgcaaacaacttctcacagtgcacagtgaaggtcagcaatgagagccagccccgccctttcttctttccaaatgattaatatatctgttaccagcctccattcattatatagctctgtcatgtgctaagcaccatgggggctgaaaaagatgttcttcctgccttaaaattccactggggatgaacaaattacacgggagctgatcagagaggaaggcagtccattatgagggctaattgagcagtgcagaccatgttgcaaactgagttagggcctggagagcttactgtgtgctggggtcctcaggaatgccacagatgcatcaataaccacctctgctactctggaagtagtcacatcaggaagactccagagataagcttatctgggctgtggccacagagctggaatttgtaagctttaggtttctatgtctcatgttaccagcttgtctataaattgtaaattacagccatctgatggttagggaatatgaagtttggttaagagaatgaaatgagaccacgaagattagagaacaggaaaagaggggactggggactacatacccatcagaatcttcattcagtcctgaccctcagcaggagggggatttcatcaggctcatttccatccttgatttcgtccatcctggttctcctgacaaggggcatttatcagagttatggcatgggaaatcacaggggagtaatgtaccatggcatttaagagtatgaacgttggagtcggagctattttctccgctacttactagctgtgtgactttgggcaagttacttagcctttctctgagcctcactttctttatctgtaaagtgagggcgatcagaataaacctccttcatatggttattttgagctttataaagagacaatactggctgagcacggtggctcactgccagtaatcccagcactttaggaggccaaagctggaggatcgcttgagcccaggagttggagaccagcctgggcaacatagggaatgagactcctgtctctacaaaaaatatacaaaaattagtcaggcatggtggtacgtgcctgtaatcccatctactcaggaggctaaggcaggaggatcgcttgagcccaggaggtggaggttgcagtgagccaagatcacgccattgtactccagcctgggcaacaggagtgaaaccctgtctgagagagagagagagagagaaaatactactatggtgcttataaaagttcaataaattttagctgttgttagtattattaaagtaagatctgtatgaaaataaagcagattttttcccccaaatgttcatgtcagaagtatatatttcattggcaaggggctgcttctggaaggttgagaggtatcctgggggaggggatagagcactggcaaaattggcatcacaattcaagtcacctcactcagtgttttttaagttatcaaaatccacagtatgaaaagcatttgacattacagtccactatatttatgcatttataaacaagagaaaaaatcacgaaaaatacagtaccacgtgcagtacacactgattccatctattctttttttttctttttcctcaaatgcacttgccgcctacttattccagacccaatgattgggtccctatccacagtttggaaaacactataagaaatgattgtgtcctctcactttccctctctgggatttagttttccaactataaaatgctcctgatgcccagccagcctcaccgctgctccgagtcaatgccaggaacgctgatttagcacatgctatttggagggtacccatccaggtgctgtgggagggacagagattgagaagagtgctttctgaccccacagaggccatttggaaaccctgggaatgggtgggagggttggaggtggggattgcttctcccctaagactcagcgtgatggaaaggcaatggggtgggaactaactggtgttggtctgtcccatttgtgtcccagcagccttcctgacagcgagataggagaggaccccaggtacagccttgggactgggtcagaagtgggtctcaacaaagggaaggggtagggtgggggtggaggacttgtgggtgggtaatgctgagtatggattcagggatgtgcagcctacatattttcagagacatggggctaaggcctgcattctcaatgagggcaaaatttggttcttggggacagaaaacacttagacattgcaatgctttgtggctgtccaaagtaccaaacagatgccagtatatctgtggtgctgaaatttcatggtgaatggagtcagaaaatagactagcgattgccagggtctggtgggagagagagggaagggactgccaatgtgtatgggatttgttttggggaagataaaaatgttttggaattagatagtggagatagttgcacaacctggtgaacgtacttttagtttcagaggttttctaaacctctgatttttttttaagtgacaggaaagacagaaaaaagtatatctaaaaaggctctaggggtgatcatggaaaagaaagttaagaaatatgactgtaaggaaaggagatgggtgtccctcaggccaggcagaaaattcagtcttgttgctttatgttcatgtgcaaatctaaaaaatccaagtgatatagattaatgaggctctgagtccctcaaaaccttccctccccttacctctccaaaaaacacttgagataccctagaggtggtatgaagtcaggatgggaaggttggctcagctttgcaaataagtttaagcctctggcctttgctctccaacaccaaagaggcttcactttggtatattttctctgccctttctccctccttgtccccaactgtcagtatgtgatgacaggctcagcctctgtaatggtagtgatcatatttcttgagccaaaaatcagacctcatggcatgtgacaagtttgcatatgtggatgagaacagagtggcagaatatttgacacgggagcagcttgggcagtccagggcacatggcactgcacctgacatccctggcagatcccccacattccgtggttgtcttctgatggggccatatggggctgcagatcatgcctggagccctcgcagctccagggctgcgggttcccagccccagagtgcaggtgctggtgtcagcctgcctggcctggcctggctctgtccagagcactccttgccccagctgtttgtgcagctgtatcagcctcagacctcagcctattcattccaacctgaatgcagaggctgggtctggaggagccacattgcgggcttcatactcctgatctgacaagttttccccccagagcctgcaccaatggcacctctccccattctccctcttaactgggtcctccagggccctcctcacacacccacgtggtcaggcagcagaggcttccccaagatgggcacaccccactctccacacctctctatgcagcatttgtggctacagactgggtccaggggattgtaaaggcatgctcatgttgggttggagggagctcaggatcttcctggaggatatggttcactcccatgagagctcagtatgcctttcctcccctgctgcagcccagagcgggagacagcgaccgacttggatatcaggtactgcgtcctgggaacattgccccccagggtcaactccctccagggtgctctcaggcccaagggagccacatcaccctgctgggcagcccccagaccccagccccagtgttgggggaggccagggagggcccctgtgctccaccaggtggctcgggagctgctgctgtttctgtgcatccatttactcccttcacataagatcatttttatctgggatctctttttcttttttcttcaaaaaccacatcactcaaaatgtggcttccttggctctgcttttaaaaaaaaaaaaaaaagttcttccatttggagaattacctgctgacttcaaagtccagtggcttgagggctacccaaagagggaggaagccagaagttgagtgttcccttggtttggtcacacttttgggctcctccctgactaaggaacaacagactgcagggctggggcaggctgggtgtagggcagggaggggatgaggtcctgctgccccagtcagttgagacccagacctctcaaacctgcctgggggaaggcaaggccaccagaggccacactaagcagatttctaccaactgcacctccccatccccttgcctccatctgagccatcagcttgacaactgcctctgagaacaagcccctgagaatgccttccgcaccccctactcccgccctgctttttccaggaagagaggccccgtggcctatgcttcgcagaaaccatggctgctaaatgccactgtggaggagaacatcatctttgagagtcccttcaacaaacaacggtaaaagcctgtcggagggaggcaggatgtggaggggaggaactgtctctggccagcctgccccagttccgggcccctccatcgatcacccacacccagccatctcactccccaggtgcttacctgcactccagcctctccatatggtgcacctggagaggggccaggtgtgcctgagcattggggcaatccagctcccataggggagagggcaggaatggagggaagggagagagccccgctgccttttctctagctggtgggagggctagctagctctctctgtgagtctccattcgcctggctcctgcactattttccctccaatgataatagttagggctagcatcgactgcgctcttactacataccaggcacagtgccgagctctttgtacacggaatttcctctcatgcttacaacaacctcagtaggtagatattattgttattcccactctacagatgaagaaccaagtttcagaaaggtcccaaggccacccagccagtaagtgaccaagatgggtctcaaatccaaagctgcctaacacctaagtacatgtttgtcaccaacatactctgatgcctccatgaactctggctggcacctgcccaggctaagggctggctggggaagtatgagaggaacaggctgggcaaatatttgaccagccatcatcattactgcctaaaccaaccagcagtggttttccctgcagtgccccaagcacgggttccggctgcagcttttcccactgcacagagatcatgagcgccctttcatcacttactctgcatatttgttcccaaccaattccatccttctagtatttaacctgcccaaacgctgtgtgaagtgctgacctcagctcttttcaagctcacacggtgtttgcttgcacccaagcgggaggcctattaaagccattgctcaccctgggcatagctacccagagactaatgaccctctgcaagtgctcgggccaactctgaccaggctgaccagctgcatcccctgcctctacccacgccaggtacaagatggtcattgaagcctgctctctgcagccagacatcgacatcctgccccatggagaccagacccagattggggaacgggttagtagcagcctctgaggggttttttcaaagccaggacccccaacctaccatgccctgagacactactcaggacaatgggtaactaggaaataggagacattgaaggctgaagagttgcctgcagtaaggtcaaacatgttgttcttgatgatgtcctttgacaggttttcagtcctgcttggagggcaaggtcagcttagtgccctcccaggctggggatcttcttcatttgcaccccaggtatacactgagagcccacacagcactgtgctcagcctggggttgtattgttcctgttcatcctccagatggggtcccctccacaagcttagacgaacaggattctcctgtgactgtcctccttttgtgtgattttaatccctgctgcctctgtctttgtttgtactggtcagatggtccctagcgcctacacaatgaatctttaaagacttggggctcatgctgccctcttctgaatgaattcagtaaacacgtgcaagttccttctctatgcaaggtgagaagcaggcaaagaagtggatagagccaggcctccatcccaaagagctcatagtccagtagggtacaggacagtgtctcctgaatggctgagggcatgatgtgttcctcctctttggtgacagggcatcaacctgtctggtggtcaacgccagcgaatcagtgtggcccgagccctctaccagcacgccaacgttgtcttcttggtgagtgcaagttcccttggggtcctggtctctggctgcctcccaggcctaactgcccacctccacctccccgcaaccccaccatcatccaacaatctccctctccaggagtaaatccctcctgccagagatattgccttatcatcctagtgatagggaaactgaggcaggcaaggatagcacaaatgacccattgcagacttcagatggagctctgcagtagccaatgaggagaggcaagctgtagttataggctgcctgtctgtgggacagcccaacccctcaacacttatgcagcccgactataagaatggctgataacagaatgtgtgctgccacttcccatcttatgcccagtgcagacattgctaattgttcacagcattatttcccatggaacttaactcatcctcagaatccttctcaacacagcactccaggtaaccactagccatcaaacatgagataaaactaggccaggcgcggtggctcacgcctgttattccagcactttgggaggccgaggcaggcggatcacgaggtcgggagatcgagaccatcctggccaacacggtgaaaccccgtctctactaaaaatacaaaaaattagctgggtgcggtggcgggcgcctgtagtcccagctactccggaggctgaggcaggagaatggcgtgaacccgggaggcggagcttgcagcgagccgagatcgcaccactgcactccagcctggggacaaaccgagactttgtctcaaaaaaaaaaaaaaaaaaaagaacgtattcgcaatccttacactacttcatgtcaagttctgttgtgtcaggtgccttgactgacactgaagaattctaagaaccagtccttggcctcaaagatttagaatctgattagggagacagagctcacccagttcaagaggcccagcccggttcaaatccaaactgtgcggcataaactatgagggggccttgtccagggagacaactgtgagggctggagtaatcagggagggcttcctggaggagagcctcaaagggagagtcaattaaacagaaggaaagagggaggccatttgcacagtgagttggaagaaggaagctcaagtctctgattccagctttattccctcccctctccctacaccacacgcacaagcactcctttactaaagacacttcacagtgggaagattcagtctccgttaccgtctgacacacacacagcgttttacaaagcatgggtgcattcgcgatctctcatgagatttaaacaaccctgctagagaaaagtgaagtggacattttatttcagtaaacgtttatgaagcgtctactctgtgccaggcactaaacgtttatgaagcgtctactctgtgccaggcacaggcacaagaagtctcagttcttgggagtgccataatcaggaatggacaaacaatgatcagatctggctttgcgccagtgtcacgggaatagggaggaaggaagggtaggcgtgggggtcaggacaggatgcaggaggaactggtgcttaggtgagcgaaggatgggtgggagttcacaaggcagacaaaaggcagagcagcactccaggcagaggaacagctcaggagaaggcccagacggcaggcttcctgggaacctggaatgcagagtgctgggaaagcacagatgaagcatgagtctagaagggaaagcgagaggttataaagcacctggaacaccagcccacagggtttgactttagagatgatggggagccgttgaaggtccaggagtcaggcagtgaagtgattagatctgtttgagagtgatatctgacaactgccccattttaaatgaggtaaccaaggcccagagaggttgggtgagttgtccaaagccacacagctaactagcttcagtccctagagcagagttgatagaactctaatgggttttatactcattgtcacccctccccaccatgcctttccctaccctctactctcttcctctcccttctgcccaggatgaccccttctcagctctggatatccatctgagtgaccacttaatgcaggccggcatccttgagctgctccgggacgacaagaggacagtggtcttagtgacccacaagctacagtacctgccccatgcagactgggtgagggggaacaagggggtcaggctatagggggcagggctggggaggctgtcaggcatcttggcaggaaccaatccgttgtcttggtagcaactgctgagggccacaaagcataagagaccagcactggatggctttatgcatgctgggcatttcagggagaccctgtacaggccaggggtttggtatcacctagacccacagacactccccatcctggcccgggccccccatggtacactcaaggctggcaccaagaagtctcaggaataatcaagtgctcacttctcaccttctgattcctgcccttttgatgacccatccccgcagtcatggggagtgcccatttggatggaaaagccctcttcccaccctatgaccttcccggggtggatggatgcaccaccccgggaatcatatgggaaatatggaaccaaacaatagcagtagtaatagaaacttcaggctgggcgcaggggctcacacctgtaatcccagcactttgggaggccaggacaagaggatcacttgagcccagaagtttaaggctgctgtgaaccatgatcatgccactgcactccactacagcctgggcgacagagccttgtctctgaaaatttgaaaaaggaaagaaagaaagaaagaaacttcaatattatcagtagagtccaatgttgtgaaacccctcattaactaaatttccatactcttcagtaggtagaaaataattactttttgattcattagaaagcacttaatttttaagatggagatcatgtaattttgaactctaggtcttgcctactcctatataaattctcctctaaacaacagccaaaattgaggccctctttgagcttcaggctggtgccaaatggctctgcttattttccccaaaataaatcttccttccatgtatgatgagaccccctccagtataaagaagacccaaagaaaatcacccaaagaaaaaaggcccaaagataagacccaaagacctaaagatttaaatatatatacagatacagaaggtttgtttctgagtttctgtagtgaccttggcaataccttgtagttcaggacaatcctgaggaacacagaagtgctggcttccttgaggaatcagtgatcaggactctcgagccccttgaaccccagcatagggcgggagggggtgagggcagcaggggtgggtgtctgaattaatgtcaggtctacgtgatggtgtcatcaagtgttccagataaaaagttttattgagccgggcgcggtggctaatgcctgtaatcccagcaccttgggaggccaaggcgggtggattgcttgagcccaggagttcgagaccagcttggggcaacatggtgaaaccctatctctataaaaaaaaaaaaaaaaattagccaggtatggtggcgtgcacctgtggtcccagctactcaggaggctgaggcaggaggatggcttgagccaggaagcagagattgcagtgagctgagatggtgccattgcaccccagcctaggcaacagagtgagaccctgtctcaaaaaaaaaaaaaaaaaaagatttattgattccaaagaggcatggccacacacacttagaccagcaggtgctttgctaagccctgatggaggctgccagacccgccgtcaagaggagctaagggtagtgtacaatgagcccacttagtgtatgacggccgctgccgtgggtggagtccttgtgagtaaccagccagcttgagcaggatgcactaatttgctctgcaaacccagccattgagaaatacgcctcagatgtaccgaactctaggtcctaggagtatgttggttggggtaggttatcaataccagcccacttgcagtggatgagctggtggccatttgtagtgaggaaagggatgtgtcaacctccatcttagactccacaattgagggatgtgaccaccattcctccccagccagcccccaaaccacgtttgttgctgcctttccagatcattgccatgaaggatggcaccatccagagggagggtaccctcaaggacttccagaggtctgaatgccagctctttgagcactggaagaccctcatgaaccgacaggaccaagagctggagaaggtgggtatatccagggatggccaagcagccacccctggatgcaaaggttctgctagaacctgaactcataaaggtcttcctgtccttagtgccccaggaagccccctaaagggcagatgtgggagctgggcatgaactggctcctaccagaggagagacagtacctgtgccaggtgcccagggcagaatcaggtgggcaccttcgccttatcctgaggtagtcagatactatttagttgcaaagtttcagaaaatcaactcaaactggcaaagaaaactaagcaaagaaaacaagagggaattaaggatttattgacccatgaaaccaaaaagtccaggtgtgtcatagctttaagtgtgctggatccaggtagtcagtgtaatcagaaatctgtttctcccatctcttgactctgctcccctcaaattggctcagctcccctcaaattggctccattctcatggtatcagtgagggccaccagcagtcttaggtttacattctcccagctcaacaactctgccagaaaaaaagtgcctctttccccatagttcagcaaaagtcccagggctgagtctcactggtccagtttggtcatgtgcccacccctgaacaaatcactgtggccagcggtgtggaatgtgaggattggcctgtcctgggtcacgtgccactttgggagccagatccacctgaatcacagagactaaaaacaggggaagagtggttccccacagggatatgggggtgctattatctgatgaaggggaaggactaaatcctggcaagatgaatgtgtgtctgtctgcccctccctcaggcagggacaaagtagaaatctgacattggtcatcaccagagtagttaccccttaacttccccttcccccaccaaccatatatcctgaagacattgcccaggccacatctgtcttttaggagactgtcacagagagaaaagccacagagccaccccagggcctatctcgtgccatgtcctcgagggatggccttctgcaggatgaggaagaggaggaaggtacaggcaatgggactgggagtgaaattatggcctgaggtctgatcagccacagagaggctaaggtttggggttctgggtgtggtgcagtagtgtgcctttgattaaatggcttccctctgtgtgcccccgttgtcccctcagtaagtggggataaaatgccctgattcaccctcagagggatggaaatgtgtagccacagagtgggttcttgcggcctgcagaggaggcagctgagagcgaggaggatgacaacctgtcgtccatgctgcaccagcgtgctgagatcccatggcgagcctgcgccaagtacctgtcctccgccggcatcctgctcctgtcgttgctggtcttctcacagctgctcaagcacatggtcctggtggccatcgactactggctggccaagtggaccgacagcgccctgaccctgacccctgcagccaggaactgctccctcagccaggtgtgactggcggcccatggcagaggttgggagtggggatgggggaagggctgagcccatgggcaccctggaactccaaatcactctctgcctgtgaaggagtgcaccctcgaccagactgtctatgccatggtgttcacggtgctctgcagcctgggcattgtgctgtgcctcgtcacgtctgtcactgtggagtggacagggctgaaggtggccaagagactgcaccgcagcctgctaaaccggatcatcctagcccccatgaggtacccgtctcccctggccaggctgggactgtgagcaagtcactgttctctgagccttagtcttcccatctataaaatggggatatacaacctgtcacaagcttgtgggggtgactcaaggagacagtgtgtgtaaaagtgccctccttgtgcaagaagcagggagaaactggcatttactcagccagatactgtgataggcattgtgtgtggttagctcatttaattgttaccatggccctttaaagtgagcgtctgcacatccaagtaaagattgttttctcctccctaagtgggtgtaatttgcccatccccacccatgagttcagctccctgccctcccctcactctctctccctcagccagcctcaggttttgacactgggggaacaggtagctgttctattaataatttcctgtaatgggatggataaaaatctcaaaggccacttgatgtcaaagaggtttaaagttgtccctgcccaattggttggccaacttggcttaaaaacacaacaggcaaacagattttctggccccttgtcgaggctagacctcacaatctaactgcactttttactttccagcctcatgagttttctgtggcccacagatatggcctccaagtttatttacttttactctctatttgccccagctctgtagttctgaaactccctggttggggttgggctgactctgggtcagccagccggcaggctgtccccagggccctgttcctcttggcaggttgtccctctggagaggactctgtgtcccaggaggacagctgctgagtcaggccgagccggcagctgagaaaggcggcagtcgtcagatgggcttgagaaactgaaaggctaacgaaaggccagcgcccctttgggcagctgcaggaattcacggggatacaggccagatgtctacaaattggcagaggatgccagacccatgaatgactccagagacacttacatgaaataattaactatctcattcagtaaacaggaagtaaatcaatggacaaatgagtaactcttcctctggctgcctcttaggttttttgagaccacgccccttgggagcatcctgaacagattttcatctgactgtaacaccatcgaccaggtacagaggaccgtgccacactatccccccttccagagacacctcggacccctgggggcttctcctgtctgaggctgggttccccagatcaggtgatcacagccctctgggaagaagccagtgtccccgatccgattataatgctgcttcagggctggggcctccctcgtgggagcctcacagtaaggctgagggaaaccagatccctttagcttccacctgagatcccactggctttctctagtaaagttccagcatattctgaaccaaggtggctgattgtatggagaatattcattttgattcagcctgtgttctttatttaccattgtaccagatggtgtgaaaacaaaatcttgattcctacctcagggagtttaccttgtagctggagagatgagatacgtgcctataataaagggagagcaaggccgggctcagtggctcactcctgtaaccccagcactttgggaggcggaggcaggcggatcacttgaggccaggtgttcaagaccagcctgatggccaacatgatgaaaccccttctctattaaaaatacaaaaattagccaggtgtggtggcaggtgcctgtaatcccaactacttgggaagctgaggcaggagaatcatttgaacccaaggggcagaggctgccgtgaaccgagattacgctgctgcactcaagtctgggcaacagtgagactcagtctcaaaaaaataaaggatcaaaaaataaagtgagagcaaaacatggcggccagtagcactctaaacacagtcaataccaaaattcacctcactctctccccctcgtctccctcagcacatcccatccacgctggagtgcctgagccgctccaccctgctctgtgtctcagccctggccgtcatctcctatgtcacacctgtgttcctcgtggccctcttgcccctggccatcgtgtgctacttcatccagaagtacttccgggtggcgtccaggtgatggcctcaggggtgaggggtgggaggtgctttgcaatgtgcagtttggtgtacttgctagactcatcgttatgagagtaatagggtcgtgttccctccaaaaaataaaaacaaaaaacagaaatgaaggaaatagaaatatccacatcttattccaccgccctaatataatagtctgccaacacacgcacacactgaggttgacatctgaattatttccttgggcgatatggtcaggactggaattgctaggtcatgataaatgcacattttatgcccttcattcattttgccaacatgcttcccaggagggttgcatcattctagtggtcaggctgattgctgatgcatgaaatcggcgggcacctgattcaagcagtgttatgataacacctcccagcccacgtgagtccagagtgtagctgtaagccttgacttgagggagcctctcacagccattctcatggatcacatttgccctcatgagctttggatccatgcacgcctctttcctcctcaaaattttctaagaatgttctctagggagttctttctgggagtgattctcccagattcatagaaactcatagattcaaaaaattgtaggaaaaaatttaaagaacgtctaggccagtgtttctcaaactgccaattacagcccatcagtgggtcatgaaatcaatatcatggatcacaaccagcatttttttaaaaatgaaaaaaacatcagactgtattcatagagtaaagcaagctttgcttcatgaaacctttgtgttggtcatggaggtgtgtgagtactgatttgtgagataaaatatatttctgactgcaggttgtggtcagaaaggttaagtacctttcccaagtgcacatagttggctagaaactagagttgagatacttattagcaataataaaatttagatgcattttggacacaattacctgccccaaaggatcaacatttgtataaatggctttttgcttggatgatccagaatggcccgacacccacacgaacaacatagctttttgacactcaaaaaattcaaagtgctgcacaagctgttctacaaagttcatttcttctgccagagaaacagcccagtctctgtggcacccagtctgaccctggagatggtttatcagggaaatcaacttcctgcatcccaaactggcctccctggcactgatgtgcttgtcgaggtgcagctttggggagcaggaggcaattctgttgccatggaaacctctggccttaccccgagacgaaacctatcatttcagcacatcactggccagggtctaaagagctccttgatggggtaagcggaagacggggttgaacgctttgagtttggtcttctgttcctttggccagctgtctcaaggttcagattgttcacctgtaaaatggaactagcactgcctgcccagccttagctcagctccaggctgtgcagcagaagtacagggacagatggcgacctggggttgacaatgcccaggacagcagtaattgtgccccacatcaggctgtgtctaagcattgtacataaacgatctcattcagtgctcacaaaagctcaatgggctggtggcattgtcttcccccttcacggggtaagaagctgaggcctagagaggtaaggccattcacccacacagcggtagcaggtggagctaggcttcaggcccaggccgagccctgagcctgccctcttaactgttccactctgttccccgccacagggacctgcagcagctggatgacaccacccagcttccacttctctcacactttgccgaaaccgtagaaggactcaccaccatccgggccttcaggtacgagtccacattcccccaaggtaggagtggaacaggggtggggccagggggcacaggccatgagatttgattctcaggactccacttgggaaggccaaggacacgttctctctcaagctgcctcaggtcccaaggcccaagggatatccaccagcagggacaggccaggtgggctcccactgaatgttctagagaggaaaattccagctctgtagacaagcccaggacctctgtgaggcagagcatgaaaagagacaaagctgggacaagtcttcatgtatcaacgctagaaagggccttaggtgcgggccaccctaagcccttcttttattaaggagcccctgtgtgccaaacactatgctgagtactgtacaggccaatcccactcattctgcactgcaaccctcggtgctgagaatggtcatttccattgcacagacaaggaaactgaggcacagagacgttctataacctctctgtgtaaggtgccacaaagcccagacttgaacctatttgttcatgcaacaaacatttactaagccccgactatgtgctaagccccatgccaggcactaaaaagatgagtcaaataagccgctgccctgcaggcgtttacagcccagactttgagcaggccaggataaatccacgtgacaagtattctgaaaaaagcggattcaagggctgtgggagcatagaagagagacagtccgggaaggtttttgtaccagaggtgtcatcagaactaggactcaaaggaggggcaggagttcaccaggctgaggaattcctgaaaacttcagtgcccctgccatcgtctcactaccctgagtggtgatgttggggtggacaggagcatctgaggttgcctggggaatgagggaagctgttgtttcccactccccaagagtctgtctgatctccagaggcatctctcttccagtcaggcaggccagagacccctgacacacaaagttgggctcttttctcatcttcatccagagagtgataataggttatttttagggtggcacagctgcacgaagtatgacagtaaccatgagacaccaagcactgtgtccaggagtaaccatagggcacaaggaccagccaagggccagagaggcttacatctcctccccccaacccctgaagtccagcttcagccctggagaggtatccaggcccctctgcccaccctggagcacctagggccagtggaaatccacctcttagggatcttgtctaagtaaagaagagcagagcaaagctctgccctggccttggcgctgctccctggacatcccttgcccctggacaagcctatgctgtgtcttccacaaagaagcttgctggggactggattatgactctagagtctcctcccagcctcctcttctcaagcctgaacttctcccgttccttcaacttccaggtccctcgacattactgagcctagcctttgctctaagttttggtgatttccctctctcaattggtgtctcagagggccctggggtagagagatggtgactcttctagagtgggccacagccccttgtgtgcagatcccagcttcctgtaaacagcctcagatcaggccaaacctgtggtcagccagagccactgctacccagtgaggtcttccacaccctactgacacggtgaatgatttttaaatttgaatgaaaggctttttaatcaaccccatacacatttaatgcattggctttaatccagcagcctgttgagagctattagcacttattgattgcccacttactgtatgccaggcaccgtgctaagtgttgtatgtgcattattacatttaatcctcacaaggaccacataacataggtacgaatcgccacattctccagatgcagaagcgagacccagagaggctgggtaatcaatccaaggtcacacagactgcgggggctggcgctgagcttggaacccaggtttgcctgaccttctgggctttcctaagagatcttattttttcccaaaagagtttcaagagtgcccagcactgggctcagtggcgggctcggaggttgttttcgttcatgtaggaactatcacttccccatttttttcataagaaaactgagtctcagtcctgatacacagccaggaagttgtgatgttcaggctccaacctgggtttacatggctccgaggctggggctcttttctagtcctcagacacactgtcgcacgcctgtggcagaagctcccatctcacacttgccgaccctcaactcacacagtcctgagacccacatacgctgagcgcctcacactcctataacacgcacatgccctgatgcacacacattttcaacacgcacttactctacccttcaggcatggtttcacactcactgcagacacgtcaccctcccacacgtctccaccctgggggtgtgcagtagcatgctctctcccacctcagaacctcccttcagtcccctcagacacatgccctctctccacgcagagacaatcaaagctgaactaacaccttccagggtgaaaagcaaatgcccagtaaggtacgtcttgggtgcctccgtgtcccctgagtttggtcctatcaaaccagcgatgatgaggcagcttttctttcgttccttcctccatcatcaaacaagtgctcctgcatctcctctgggccgggcctacgtcagcaaggtctgagggaagcggccaaggagagtgatgacggcagcccaggttgatcagagaaaggaggcaggtccatgcgcagtaactcagggaaaacatgatgaggacctaaggatgagaaagaagcctccagagttccctgtgcagagagattccatcaatttcagagggtcaggggagtgccatgcattcatccaacaaatatttattgatagtgccaggtgctggggtatattggtgaataaaacatcttcatggaatttgcagtctattgagggagatgattataaatagctagagaaatgcatgtacagcagatactgtggagcaaacaggttgcagacaataataggggaaacctactttatagtaaggtagtagccaggaagagcctctctgaggaggcagcatttaaggcaagccctgaaggttgagttgagccagccttatgaagagcaagggcaaaagccttccaggaaaagggaatagtgtgtgcaaaggccctggggtagggaagactttagtattgtcacagagcttttaaaaagctgagtggctgcagcatagtgtgtggggtgtttgtggcaggaattaggttggcaggagggggttcttcatcctataagcagtggaaggtcattaatattcttttttatttgtttttttttttttttttttttttttttttgaggcagagtctcactttgtcacccaggctggagtgcagtgaggtgatcttggctcactgcaacctccacctcccgggttcaagcaattatcctggcttcctcagcctcccaagtagctgggattacaggtgtgcaccaccatgcccagctactaatttttgtattattagtagagacagaattccaccatgttggccaggctggtcttgaactcttgacctcaggtgatccgcccgcctcagcctcccaaagtgctgggattacaggggtgagtcaccgcatccggccggagatcattaatattctaaacagtgggggagaggacacagtttgcgatttagatagattaagccagccactgtgtggagcatggactgtagggagacagcaggtagacgtattcaggaagctgatgcagtagtccaggtgagagtttgtggtgggcaggaagcaggatagagggggagggaggcaaggactcttttagagagagacataagaggacttgccaaggggctgaatgtgaatccaggtgattcctgggtgagaaactgggtaaagggaggtgccccttattataatgggaaagacctagagaaaatggatcttggggtgaaaacaagagtttggaggaggtggggattctggacaggtttgaataagcagaaaggagtggggtggacattccagagagggatagcttacatgaagtggccacggtggcatgtctggggactggaggggccctggagcctccctctgcaggtagggagactcctaggagctatgtggaccaacactgttcccttaggagcttctcatcctccctccaggtatgaggcccggttccagcagaagcttctcgaatacacagactccaacaacattgcttccctcttcctcacagctgccaacagatggctggaagtccgaatggcaagtgctattcccctctaccctggcctctgataggagggtggggccagagcaagagcacacaggtacctggggatgaaagagaggataggataccagatcgtgtggacaccaagccttcctgcttcccccagccctggtggtcctcctagtgtctagcctgtgctccttttccccatatcactgcctggaggcttgtgtatctgaggtgtgtgccagtggcaagaacagttgtggtgaatgtgtatctgcagtgggtcatatgacacccacattgtgtgtgtttgtgggccagctgaggcgtgcatgttaaagggtgtgcaggggctagggggtaggggagcatgagcttgtgggacatgttggctcctggggctccagccttcgcagcccttgtgtgtgtctggtgacgtgtgcatgagttgcagggctggagtggaggcctggctgagctgctctctgccccgaaaaggagtgaggtagaacaggggcctgtggctctaacccctgagcgcccaggtcagctcctctccctccccaggagtacatcggtgcatgtgtggtgctcatcgcagcggtgacctccatctccaactccctgcacagggagctctctgctggcctggtgggcctgggccttacctacgccctaatggtgagcggcagtgggctagggcagaggaggggtcagacaccagcactcccggagcaccttcgtcactggagacatgagacactcccaggccttaccccaatttcatttgcatctgatgccagagggacagtgcgggcaggaaggctgaccagcaggccccagggcccaggccccagacaggtggaggttggggagccacatgactgaccctccctgtgcctccagggagggctgctctgagcaggcagtggatggcagcaaaaggaatctggggccctggcccctctccagccttaagaagagccattctggtggctgaggacagaactaagcgaccatggagtgtgcgccactggcttgctccccacaggtctccaactacctcaactggatggtgaggaacctggcagacatggagctccagctgggggctgtgaagcgcatccatgggctcctgaaaaccgaggcagagagctacgaggggctcctgggtgagaggctcagggagaggggtggggaagagtccaaggaggagtgtgtctgggttgggggccacaagggagcctggggatggggtggcactttcggatactagctgtggcccatgcctggtggctgagcccagcccggcccccagcaccatcgctgatcccaaagaactggccagaccaagggaagatccagatccagaacctgagcgtgcgctacgacagctccctgaagccggtgctgaagcacgtcaatgccctcatcgcccctggacagaaggtcagagcacgggcccaacccaatgctgcaggacaggcgtgagcaggggatggggcatgcacggagctggatggcttcgcagtcacctcgtggccctccagggccgaggcctctcactattcagacatcgcagtctcctgccctgggcctgtgggggcccatctttcctctccttctattgccttcccccagtgctgccctcaggccttgtcttctcactcatccaccaaggagaccgacactctggactcccccagctcacacgggctttgtcagggcctccctctctgcgaatggtcaggggctttccctagggcactgccccgagcttcagggcagggacctgggggcagacagcgaggccacccttgtattgagggtgagcccctgcctatggccctggcccagctctcctctcgtttcccactctgtctctttgtctctgtctcactttgctgtggctgtccatgtcattctctgaccttgggatgtacctctgtccctgcctctctcatccttctatgtcactatctgtctccgtattgtaatttctgttggtacccaagtgccaggaagcaacgggatcagaggtggctccattgtagggcggggcacacagacacatccatgcataccactctcagctgcccctgtgtcctcctgccacacccatgcccatagagacacaccactgccccccagctctccttcagccaagtacccggcacacccagacccacaccaaggcccaggcaaatggacatccatgcctgcacttgcgtgccggtccctgtgtaagccctctctggacccactgcaggaaacaagcccaaacctgtggtgtccaaagagaaactagtcagaaaaccaggccaaaaagataccctgtgacctcccacacctgcacacacacccagagctagcatagaggctattcccagcagccccagagtcccagtggcggtgcctgcttctctctttccagatcgggatctgcggccgcaccggcagtgggaagtcctccttctctcttgccttcttccgcatggtggacacgttcgaaggtgagttgtaaggcgggcaccccacgtgtacccacagccaccagatgaggcctcagccctggcacgtggtcagacatgacaggaggcccagcagtcaccgccttcccctgcaccctcactgggacccatgcagggcacatcatcattgatggcattgacatcgccaaactgccgctgcacaccctgcgctcacgcctctccatcatcctgcaggaccccgtcctcttcagcggcaccatccggtgagccccaccacccctcaggcccacccagccccaggccggctcagttccatcagatctggagcacaaagaggagggggttgggggagaccaggatcccagaggtgtttcctgctcatgcccttctccatcccatcaggcccaggcagcctctggaaggggatcccccacccatgggtctaagatgctgtcccccacccactgccaccacctcggtgcttctcccagccagacctccaactcagtctgctctcgctcactgccctctttgccgcctggggatgcaggcaggaccctgctccctccctactggggctttctgtgccacttccagatttaacctggaccctgagaggaagtgctcagatagcacactgtgggaggccctggaaatcgcccagctgaagctggtggtgaaggcactgccaggaggcctcggtaactactcctggctatgcagctgggttggttgggcactcaaggaccctgtaaggatggcagacagaagcccgtgtctcaggtttgccccaagtttggagtctgaagcctggcaggaccatttagtcctacttctcactatacgggggcccagagaggtcaggtgtcttgccccaggtcacacaactggtcagttcagggtctggctcctcctgcagggtacagcgggtacagtcagggatccttgtgagacagagattgcgagtcccccatgccaagggggcatcttcagccctgccctgccccatccacctgcatgcccagttctgccttaggggaggagaagatggactgggcaatcatagacacgggtcactcatcaaggccaccggtgattggcaaagccttggtatatttgctgcagctcctggagcattgggggtggccaagccttggtttcaatgaatcaccctaccaaggccctacatacacactcagtgcacccctcagtgcacacgccccctcccagaactgcccagggccacagcagcacacacctccaggggtgcccttctcgttgcagtccttgcagacggcctccacattgttgtgtcaggtgcaccagccctgcacacgcctgtgctcttggacacacacccacctatttgcccccatgcacacattttccaacagccccccaagccatcccatctgctccactcacagcacaagattaactcagtcctacttcatctccccgggctgttttcagatgccatcatcacagaaggcggggagaatttcagccagggacagaggcagctgttctgcctggcccgggccttcgtgaggaagaccagcatcttcatcatggacgaggccacggcttccattgacatggccacggttggtcctgggcccctccatgggaccatggtcttggaaagggtttagtgggatgctagggagaaatttgcacgaagtagtcctgaggctcaagttgcctctaacatcaaatgctatgtgttgcagaaaatgaaaagagctggggggaccctgactctgtctagtcttagggaatgttacacacacacacgcacacacaaaaacactatgcaaacacacacataagctgcacacacagacccacacagacttcacactgtcacctatcacaacagcacacacacagccacaaccacaacctacatacacacacagagctgagctcccaacaggctgagtccagtccctgagtgccgggaacctgttcagtcctgtggggtgggggtgggactaggatcggggtcagatgggagctgagccacagacctgggctccacatcccccaagccaggccagaccccatccactgggcaggtgagccaacagctgttgcccccacttggcaggaaaacatcctccaaaaggtggtgatgacagccttcgcagaccgcactgtggtcaccatcgcggtaaggggcccattgatggggtgcagagggacacccagggacaggactggcctgttgtggccgtcatcagtgcacagcccctgggcttgcctggtcccagtaatcaagaaagaaccctgaagcaggcagttcagggcaaggggcctggagggcatgcagggagcctgggttgcaggatttggggtggggggttttgcccctgtgcttccctcagacctcccctctccttctccaggttccaaggcctgcccctgtcccaaggccttatatgttaggctggcgttacttctccataggaagtgggggaggggttgtggagggtctctgagccttgaagcctggaggtggggtagagttgggacttggagaggagagaagggtggtattagcagatggagagcttgtagtcacatccaccccaggaaagtgcagtccccacagtgacaggacattctggccacatgcctcatcctcctcctccaagccgcaggagggccaccctcagctgtggcccccaccgcgggtggtattcccaccatcctgacccgccccctcctgccctgcccagcatcgagtgcacaccatcctgagtgcagacctggtgatcgtcctgaagcggggtgccatccttgagttcgataagccagagaagctgctcagccggaaggacagcgtcttcgcctccttcgtccgtgcagacaagtgacctgccagagcccaagtgccatcccacattcggaccctgcccatacccctgcctgggttttctaactgtaaatcacttgtaaataaat

SEQ ID NO: 15315 - DNA, 84347 bp, Homo sapiens
gaggcgcggcaggcgcgcggagccagcggagccagctgagcccgagcccagcccgcgcccgcgccgccatgcccctggccttctgcggcagcgagaaccactcggccgcctaccgggtggaccagggggtcctcaacaacggctgctttgtggacgcgctcaacgtggtgccgcacgtcttcctactcttcatcaccttccccatcctcttcattggtgagtgcgcgcagcgagccgcggaggaggggacgggagagcagggagggaggaggaggcgctgcgcgccgcaccgctcggcgtccccttccggcccgcgaccgccgtccgcctcgttcccggggtcccctgccctgtgtcctgcccgccggtccccgcactcgcacaccagctcatcccttcactcccccggtgcccccgatcccgcgccaaacacagcggacgtttgtgacccatgggatcaccaagttttgcttctgcagggccaagagctgggatggggaaaagggaaagaggaggtctcagcacgcagtgggaaactggagaggggtcgggcctcaccctccgtggcgcagcttagggagccgggtcacccctcccgcaaggcagcctccctgtcagccgcagctgggcctagggaagagggaagcctgtgctttggagtctgggatggaggcccagctaacccctatgctttcaccgggctgagccgcgcagtggtccgtgatctctgacagtcccaggcccgcgccctgggcgaggagaggcgagagctagggacttggattcccttcccccgccaccccacccgggcatgtgtctccagagcgcaacttctcaggctctgcgcaaagtagctccgactcgccgacgcagcgaccccggcgcccttgcttgcaaagttgggcgccacggccgggacaatcgtgcgtgcctctccactgaggtcccccccatctctctccaagaccttgactcttccagaccagtcaagtctatcaactcatagggtgtcccctgcatccccaaaacgtgttcattcactttaagaaaacaagcaaatcttaaaattcatatacagctttggggaagaaaggaaagattgtcacaaaattagatttacaagaggttgctgcagaagcagagttgctagttattaacaaagacagttagatagaaatagaaataaaacatacaaaatatgtgctcatatgtgcatcaaaaatcaaaaaagaacagcatttacacttctgttctcagccaaacggtttattaacctgatgacttgtcacacaagaagttagtatgtataatggggtaccttggcagggcacagtggcttacatctgtaatctcagcattttggtgggctgtgacaggaagactgcttgagtccaggagttcgagaccagcctgggcaacatagtgagaccccccccgccctttctacaaaaaattaaaaattagctgagcatggtgatgtgcgcctgtagtcccagctactcaggaggctgaggcgggaggatcacttgagcctaggagatcaaggctgtagtgagccgtgatcgtggcactgcactccagcagaggcaacagagcaagaccctgtctcagtaaaaaggtgtggtgggggaggtaccagcataggaccaggctgaatgagttggacgtttagtttgtgtgtaccagccttggggatcctcatgtgtaggtgtcaccctcaccatggacccaatgcccaagcacctttctggggttcatgcaccctcttcctcctccaagtgggcaggcatcctgcctctgactgtctctccctgcaggatggggaagtcagagctccaaggtgcacatccaccacagcacatggcttcatttccctgggcacaacctgcggtggatcctgaccttcatgctgctcttcgtcctggtgtgtgagattgcagagggcatcctgtctgatgggtgagtgactgtctgaggactcaggaaagtgaatctgctccagggtacttcctgaaaggcccaaggagatcctagctcacctatattccacaagcccatgtcttttgttactacatccagcagctcagtgtcttctatgtgccaacctctctgagctgggcactggacgcaagtgagtcccaggccctgccatcagtccaggagagcagagggaacacggacctgcatgccaagtcccagtgaaataatgctagagcctattagaatgccacaactccagtgaaaaatgtctggcctcttctacaacctgccggagttaccttcttggaaaaaaaaaaaaatctaaccatgccacccactcttgcataagacctttccttggttctcagctgttttgaagatgtggtctcagatcctcagcccaccattcaaggtcttcacagtcagccccacctatctctggcctcattccccatgcccaccttccgtttgggcctcacagcacactcctcacacctctgctacagcacagatcacactgtatgttaaagtttatgtctatttgcaaaactgtcttcagagtcagaaaggcctaagagttagaatctgagtcttgttcatctttgtgttcacagtgcaaggcatgtgataaacataaacattattcagtccataaacatttattgggtccttaggagaatgaatgaaaccatgttacaaataagtactctgggaggtgagaggaaggcagaattgggcaagctccatggttgagagggctttggagcggagtctggaagggtgactaggcttcagacacacagaggaggaaggagagagagaactggtggtgcctgagggaagggaaaaggcaccaaagagaaaagcaggtagggctagggagcagcgcaggggctggagcattaaacacaggctggggagcgatggaggctgaggctgggaacccaggttggggcatctcaggaggactgtgaatcccagcctgcatgtttgggtcggatttggtcagcagtttggaacagaagagagatgtcatcagcataacacttttaggtgggaacctgaggtgttcagcgcaggctggaggcagggagaatctagaggtataatagaagcaggacttagcattgactgcagtagtctaggtgagcaataactgcagacagaaatggtgtgtcagcagtcagggacagaagaggagcgggagcagccatctcactaaggaagaatccagtaaccagcaaggatgagagactgccaggagagggagtggtggaggagagggatatttggcttgagtatctgaggtccagcgccccctgagctggaatcagattatacccagactgcactcctgcagtgctgcctggctcctgtagttggatggcaggggataggctccctcatcctccctcccgttccccaccttcccttccccaatgtccctgcatcctggcttcagcagtgatctctaaaatacctgcttgacttggaggcagcagctctgcctgcttattaaagtccctagaccagcaagaagaccagaaggcatactgctacacaagcacgtgacaagtccgcctccacccccacccctacaccccttccaaagtagcacaaatgccacagtgagccctcagatgggaaatactcaccagatggtgacagagaaagacacctccgcccttggagaaggaagacctgggtcttcagtgagcactgctgctgtgtaccagctatgggactttgcacaagtcattcaggctttctgggcctcataagcatttataaacatacgataaaacattttagttgccaacttaaaaatgtgtgagaaagtataaggtgtttcaaaattatttcaaggagtaaagaggcaagagttttgaagatccctgggcagggtgttggctgttcccagtgtggccattcatgactgctctctggccttatgaaacaagcatcatagtccctggcttgcctgcttcatggggctgtggagggtgaaattcgagcatggacagggtgcagagcccggagtggcagagcactgggtagactgtgtattcccagaatgtgggaaactggaatgaatcggtccagggatgccctcctgctggctgtcagcagcccctcctgtgtgtggctgtactgcttcagctcagtgcaaagggccatctcctccccagggcacagatcagctcaagctgagtaattgtcatctggtctttgtgagctcctacccccaggcctgagtgaggggcaggaaaagagcagacaggagaagtcacagacccttgtgatacctccagtctaatccagcctgggttttcagagctgtctggaaatttagggggcaggtgggagggggctgattaaggcagccctgatttgatttagagtgagcctcatttagtgactaattaagccatcttaaacctgtagggcttcccctcttcctttgggtattatttctttctgtgatgttctgaattcagaacaatcaaaacagtataagttagtgaagaagatattttttaataactacaatattttcccagaccaccatacactggataaagcctgtatataaaactttacctaatttcttaactaattgaatgtgtattatttaacaaagcagctaaaaactattctatgaagccatgtcatgaaatatttagttcaattatggttaatcctcatcttatttcgtcttataaaattttaacatttctacctcctattgcaaaaaaaagcatttatatcagcatataataaaacatgtctagatgtcagcttaaaaatgtgtgagagagtagagggtgtttcaaaattatttcaaggagtaaagaggcaagagttttgaagatccccaggaagggtgttggctgtgcccagtgttgccattcatgactgctctctggccttgtctgtcttgtaccttctatattagtttgaagaccttttttggagaatattcactaaagaatatcaatatctaccatttcattaaaaaagaaatgtggagtttgccttttcaagttggtttgatgcttattgatgttttcagggacccagcctcttcccatctttccataccatcctgtgtgtgtgtgtcagcctatcttccccatggtcacaaggtggctgcctagctccgggtattgcttagcatgagcagagagggcatgctgccgacatgcctctcctttatgacagagatcattctttctttgacatctcactggccagaatacgtggaccaacactggcaaaggagtatggaattgcatggctgcttaaaccaatcaccatccattccctggggctgggtatattgctgctggagcaaacctgtggtcctcctggcacagaataaggggaagatactctttggtggacagcccacattgcctctacacttgcacctcagtcccaccagacccactgaggtcacaggatagctctcctcatgtccttcctccttctctgttgaactcttatgtatccttcaaagtccagcctggtgccacctcctctgggaagctgtccttggttgcccaccccctcctttgtgctctctcagtctctgtccatcggcagtatcacttccctagcctgctgactccaacagttagctctgagcatggcagccccctccataccatcagcttctcaagggcagggacccttggcacactggatagaagtagcctggtgggcaacagcagcactgaggcagcaagctgtagcaggccatctgggaatggagtgggtaccacagggctggagcagaaagggcaggctgggcagatctgataaagtggctggaggccacatagcctgggcctttcgttccaggctgagcagagtgggttttgctgtctgcaggagggagctgtggaagggcatgatcacgaccaactaaggtgaccctcctcaccaggcccagggaagactgaggcctggaaggaggctctggctgcctctgggtcttacccccaggccacagtccacccacttagaggcctctgtgagttaaggtggagagactatgagctggtattgactgctccattccccatcccgagagaggagacaaaatcagtgaccttggaaatgcctcttcgtgcctcagtttcctcaccccataaaatgggagactaagagtacccactcgatggggtttaatgaagattaaatgggttaacatatatcgcatgcttagaacagtgcctggcacagagtaaatgctccataaatactgactctcatcagtttgttatcacagcctctggggagggcgccagtgctgacttatgctgttcgtgttaaatggggctgtcactgggtgagttgtggcatacaggcccctgcactgttcaagagaccccagcaacccttgtgcttagggctcagcacatagtaaggcctccagatcatatacccagctctactccatgtactggcagctctgcccagcccataccccaaatacgcccattaactaaagggccctgcagcctataaagtgatgctataaaggttcagtgttcagcctttgaaattcaaggcctgggctgctctattgcagtacttagcatgtccccatcctgtctgtttctctctcccatctcagggtgaccgaatcccaccatctgcacctgtacatgccagccgggatggcgttcatggctgctgtcacctccgtggtctactatcacaacatcgagacttccaacttccccaagctgctaattggtaggtgaggtgtaggagggaggggcagtaccttcattcatttcttcagataatgtttactgaggactcattatgtgccagctattgctctaaacagtagagatttggaatagaaaaagaaaaaaatccctgccttcatggagcttacagtctggtgaaggaggatagacaggcaaagacagtgaataaacaagcaaacaaataggtggtggggatgctatgaagaaaatcaagctgagtaaggggtaggggcaatgacaatgttgctatctacacaggatggtcagggaagggctgtggtaactgtgggcatgcagatatttgggggaaggtattccctgcaaggggagtgacaagtgcaaagtcctctgatagggatagatttggcaaagatgtcactgtgggcaaagccaaatgagcaaggggaagagtgggaggtgagggcaggcgtcaggagaggagcgagcaagagtcccaggctctgggcctgagagcctgggtgaactgtggcatcaataactgatgtgacagaggagggggaggtgggctgtggtggggataaagttttctactgggggcatatcgagtttgagatgtcacagagacagccaactcaagtgtcaagttgggctttcatggggaggtcaggacaggagctacactttcaggaggtgggccttgtagatgacatctaaagcttgagcctggggctggctgccgtggctcacacctgtaaccccagcactttgggaggccgaggtgggcggatcacccgaggtcaggagtttgagaccagcctgaccaacatggagaaacccccacctctactaaaaatagaaaaattagctgggcatggtggcacgcatcggtggtcccaggtactcaggaggctgaggcagtcaaatctcttgaacccaggaggtggagattgtagtgagctgagatcgcgccactgcagtccagcctgggtgacagagcaagactccatctagaaggaaggaaggaaggaaggaaggagggagggagggaagggagggagggaggagggagggagaagaaagcttgagcctggatgaggtcacctggggagagaagagaaaggctctgggaccagagcttgaggtttgctaacatttagagagactcgggaaggactgcccacttagagcttctgagatgttaaatactgcaggactggggtcccaggcagaagcaacaggatgatggttggtgtttactgagcatgtgccatggggcaggctccatgccatgttccttacattcattgtcccacaggctaattcccccagcctccttattggtattgttaatatccccattttccagtgtggaccctgaaactgagaggttaaaaataataacagtaaatactcactttgtacttactgtatgccaggccccatcctacctatgtgatatattaattcatttaatccttgcaacaactctatgaggtaggtaccattattattttccctttacatatcagaaaactgaggctcagaggttaaataactggcactagtctagctcgtcaaggggcacagccgggagtctagcatctgtgcaatctcctaatcatttctgagactgcgtgtctaagggccctcagacttcgtccttggggtaaaggtatcaatccgcaggtctgcctctgtgttggggttcagcctgtgtgtctaaggctggggctgtacatctggcagttagactttgttcacactatgtccttaagtcagactgatttttaggtatcacagcatcgaattgacatttggagtctggcacactctgtgctaagccagtgacatcatggtgttgtcagggagtacagggtgtttcttgcactagtcacaggtctgcctttctgtagaaggtgggatctgagctccattaggattatccaggtgatccccctacccctagcccaggggcccccacatgagtatgaatgggagctgggggaagcaggttgagaggggagatgttaaatacaggcttcagagagccaccctgcttccatttctgaagtagctccttgtctgtagagaacccttcattaaccagggcctggctgaccagtgtcctctggaaacaccctgtctggacatctgaggagttcattttctcattctccagcaaacacataatgttctctctttaaagcacaagttatcacccgtggatggatttgtccttttctaaggaacaaagactaactccctccattccccttgttggagttatctccccttgaaaggacactccacagagccagaaattctagaacagggaaaagtggaggggacgtgcctgtgaactgcagggacagaaggaaatgggtattgggagaatggccagccctccaaggggctgatgtctggcctgggtatggagtcccacagaaaggggacctgtgatgcagcttacattgtcccgtgagggaaccatgatcctggaacccagatgaggccaaggaaatgttctctgaaaaagtcatatttgagctgagaactgaaggaactaactgggagaagggaggaaagagtgcttcaggcagaggaaacagcatgtgcaaaggccccaaggcagaaggaacaaaacacattagaaaattcagaagaagaagagtggcgtgggtgcaaagtggaggggagctggactttgggttttgtttgcttgtgcccaggctggagtgcagtggcaccaccttgggtcactacaacctccgcttcctgggttcaagcggattcttgtgcctcagcctgctgagtagctgggaatacaggcgtgtaccaccacactcagataattttttgtatttttagaagagttgggatttcaccctgttgaccatgctggtcttgaactcctggccttaagtgatcaggtctcaacttcccaaagtgttgggattacagccgtgagccaccgcacccacctggaaggtcataccacagatgtttgcctttatcccaacagcaatgggaagttgtgtgtgtgtgtgtgtgtgtgtgtgtgtgtgtgtgtgtgtgtggtttaacatgtttaacataaaatttatcatcttaactgtttttaagtatagtgttctgtggcattaagtatattcacagccgggcatggtggctcatgcctgtaatcccagcaccttggcaggccaaggcaggtgaattgcttgagctcagaagttcgagaccagcctggccaacatgccaaaaccccgtctctacaaaaaacataaaaattagctgggcgtggtaatgtacacctgtagttccagctacttgggaggctgaggtgggagtatcatgggaggctgaggagagaggatcagttgagcctggaaagtggaggctacagtgagccaagattgtgccactgcactccagccaagattgtgccactgcactccagcctggacaacagagtgagaccctgtctcaaaaaaagaaaaaaaaagtatattcacagtgctgtgtagccatcaccactatccatctccagaactttttcatcttcccaggttgaaactctgtactcattaaatgataactccccatttctccctccttacagcccctgacgaccaccattctactttctatctatgaatttgagcactctaggtacctcatctaagcggcatcatgcactgtctttttttttttttttttttttgagatggagtcttgctctgttgcccaggttggagtgcagtggtgcaatctcggctcaccgcaacctctgcttctctggttcaagcgattctcctgcctcagcctcctgagtaactgggactataggtacctgccaccacgcctggctaatttttgtatttttagtagagacggggtttcaccatattggctaggctggtctcaaactcctgatcttgtgatctgcccacctcggcctcccaaagtgctcggattacaggcgagagccaccttgcctggcctatttgtctttttatgacttgcttatttcactgagcataatgtcctcaaggttcatccatgttgtagcatgtattgaaatttccttcctttttaaggctaatattctactgtatggatatgccacattttgtttatctattcgtctgtcagtgggttgcttccacctcttgactcttgtaaatagcactgctatgaacatgggtgcattgaggggttttcgacataatcataataattgctttatggagaccagcttggaggagaacaagatggggaggaagtgtggaaaccaatgagaaggctctcagggtatagcgggaatacagaggacgcatgatgatgcctggacttaggtggtaccacagggatggagagaagtagatagagtcaagctatttaggacgtgaaatagacagcatttgttaatgggagaggtgtggggcgagggagaagaatagagggagaaggaggagtaatgggagctcaccagcagcccccatgttatgcctctttccttccttttccctcttctctcatcaggcattcagcttttgctgagtacttctgtgtctgacaacaggctgagcactcagcactgcaggacaggactatgcaaaaaacctctgggcctagtcctgggtgcactgctaattccctgtgtgaccttgcacaagacatccaagctctctgagcctcggattccccacctgggcaggaagagtaagtccctgcctaagtcatagggttgtaatgaagagcaaagcagaccatatctgttaagtgttagggacaagacaagcatgaggcatattttcaagtctcggctcctgtaggcagctctcactaagggctaaagggcttctgatgcctgggatagaatctgtccggcagagtggagtggaggcagggggacagccttcagctgtggaattcctccagtcctagagaccagcctgagctgggggacattattccagtcctgaggcatgagagcagaaggccgatgcttctgccctccatcctaatgtcctcctgcagggacccaaggtggatggcatcgatccccccgggtgagctcagccctgggcgcatggtggggcccaacatctcaacctgtttcctaaccctgagccaggcaggacagatcccagatttgtgcccaagagatgctctggcatccatgcccaggcccacatagggatagagggcagggtgaaagtctctctccctcactcgggtcctctggagaggggctctgtgtcatgaagctgaccttatccgcatctggtctaggagggaggagggaaggagctgccagtgctaaaatctcccccaccctcaaagggggacttcacaggttattgctggttttggttgttggaagctgacagtgatttattggcagattgaagtgagtgtgtgtgcgagaatttaggatagaatctactgatagcttctgaggtttaccttccccaggtcttaaatctggagataataaaaatataacagctaatgtccaaagagcacccgctgcgtgtgaggctcactgcactaaatgctttccatatgtttctcacaagaaccttctaggtagcactattatgattcccacttaatggatgaggaaactaagctctagaaggctaagtgactaatccaaggtcacacagctattatgtcacaggctctgagcccaggtgtatctggctgcggagccaccaccactaacccctgtataacgctgcctcacagaactgtggctggctctttccgtatcccccatgcccctgctccatcatcatgctgtggtgggctctgaactgtgaggacagggatccaggctttcaccctctctctgtccctagctgccagtgcacttgggcaaggtcacatcctatttctgggcctcagtttcctcatctgtaaaatgaaaggctggattgaatgacctttaagatttccctcacttggaaattccacaagtaagtcattatagcatggagcttgcatgcatgggctccagcgtcaggccagcccagctctgccagttaatgggtgtgtggccttggatctgttacctaacctttctgagcctcatttcctttgtctgagaaattgggggtgacggcagtgtactttctttgaaaagttatggtgaggaatagataagatcatgtgtttaaagtgcttacttggcacagtgcctgtaacttagttaaattcaataaataaatttcccattcttcccatgatcatttatttttaagggacatttgtctgaccagtttgatttatgagattattggtgtttttcatgaatgttaagacgtacgtgcgtcatcttagagtcatgtactctgatatattcacacgtgcacatccacttactcggaaatgtacacacccaggcacgcttattctgtctccttctctgccacatacttgcacacattatgtgagtgtacacacatgatgcacacacgtctctgcgatcttccatctctcctcggcagccctgctggtgtattggaccctggccttcatcaccaagaccatcaagtttgtcaagttcttggaccacgccatcggcttctcgcagctacgcttctgcctcacagggctgctggtgatcctctatgggatgctgctcctcgtggaggtcaatgtcatcagggtgagggtaagcaggccacctgggccagggtggggtgggaagcagaggctctggcctctgtcctgccctgggttcaggcccccaccctgcttctcagccaaactgagaagggatcagcttgttttacccgcccgtgtaaaggggagtggggccgtggcggaaatttcaggatagacactgcatctggcccacgtgtgctctaccccagggtcccagagggagaggggggtgatgggtgtgttcgctgaggttggcggatgactttccgtagaaagggaagataagcatcaggcactggcctctcctactttctttcttcgggggtgggggactttgctttaatgtattcatatcgtcacgctggtaaatgaatgagtaagtgttttgttttcctttctgtttgctcccgcctccctctctcttcctcaccccagactccaaccttccccttcccctgcccctacctccccaggcagcccagactaatgaactcgtttgtctttcccatgctttgtttttattagtataataccatatgtgtctgtctaaataaatacctattcaggttttttcctctcaacacaagtgaatatgtaggtttcccccacggtatttatcttgtaagaatgggatcatattatgcagttttctgcactgtgcttttctcacccaacaaatatctcttgggactccctccaagccatctgatatggctaattccgttttcttaatggctgcataatattccatcgtatggatgagccataatgtgttcagctatttctctatggatgggcatttactttgttgccaagttcttgccttcatgaataatggtgtgttgaacatacttatatatttatgtattgctgcttttatttctatgggagagagtccaaggaatggcgttgctgggtcaaagggtctgtgtattttaaattttgatcagtgttacatattgccttccagaaagactgtaatctgccagcaatgagtgagaaaaccctttccctgccttccaaccagcagtgagggctacagccctttcgaacttggactgcctgcatttctctgactcttctgcttttagttggtgatctgcagggcacaaagctccttatgtgtccccccatccagtgaccctcacaggaaccctgtgatgcaagcaccatcccctttatagatgaggaaacattttagatgaggcttgtccaaaaacaccttgctagtaagtggaggaggcaggattcaaaaccaggtctgcatgacttggagttctgtgaactgtatatgaaacatggtggtatccttagatctgtggagaagatagcatatgagagattcctgctcctccccaacccaacctaaacccaacccagcctagccatggggggttcaaagtcgacctcaatgagcagttacaaagtcaggatgccctgacattggtggccaagaagtgttggggaatccttttcctggtaataattacaggcgaaagatggccccatctgttagagatcaagtgtggaatatcacaaccccagatccttgctggggcaaggtagggagtggtgagaagttggacttacccatcccccatggcccatgtgccccacagagatacatcttcttcaagacaccgagggaggtgaagcctcccgaggacctgcaagacctgggggtacgcttcctgcagcccttcgtgaatctgctgtccaaaggcacctactggtggatgaacgccttcatcaagactgcccacaagaagcccatcgacttgcgagccatcgggaagctgcccatcgccatgagggccctcaccaactaccaacggctctgcgaggcctttgacgcccaggtggtcagtgggggcacagccacaccatctattcactgccttctggtttagggtcacagagagggacctcaaagggcattaggtcaaaatcctggtgggacaagaggggaaactgaggctggtgaggggaagaagcttgccttaagtcacacagtgaaccagggacaggtgcagggctgaggattcataggacaggcacagttggaatggcccttaccgtttaggtcgtctagtccaaagtccttatccagatggggaaactgaggctctgagaagggaagtgaccccactggactctcacatccctgtgctctttcctctgcagcttactgactataaaggttggagtgttcacttgatttggagcaggggtgttagtggcctgatccttatggtaactctatgagttgagccagacaggaatctccccatatcactgaggagcaaattgaggccctgagaaaggctgtgacctgcccagagctggccacagctggcaggcggcagaggcagtctcctggctcccagtccagtgctccttcacttcctctgccctcgcaccagggcagttgctgaggcagacacggtggcaggtggtaatgagtgagtgtggcacatggccacctcctcattccagtgctgtgctcatcacatagtccctgaccagctgtgtgaccttgagcaatcatctggccttagtttccccatctagaccatgttggtgttgatagggccctcccaactgtgcacttgctgattccatgatctcttcctggagttcacctatttgcagaggatgtgaccactgggtttccccagacaacaggagctaggggcatcctgggaggctaggcccagccgtgaattagccctcaggcactctgacctggccatggtctctctgggcagcggaaggacattcagggcactcaaggtgcccgggccatctggcaggcactcagccatgccttcgggaggcgcctggtcctcagcagcactttccgcatcttggccgacctgctgggcttcgccgggccactgtgcatctttgggatcgtggaccaccttgggaaggagaacgacgtcttccagcccaaggtaggcagccccaggggtagggtaaggcaccctctagatggttttcagttgtttctgagagtgcaacaggccaatgtgtgtgagccatggccacactggagtggctcctcacacatgcgcaaagcccatagcagtatccccaccacagaatactctacatctggtcaacagaaatgccagagggcgagcctatgccccaagggtatcctactctcctctcaccgtcactaccatagtacctctcccggtagttaggtcagtccgaaaactgcaggaagtgcttttgtttgtccagtgtctagagcttctgtgacttggatttgttggctttcagttcatgtcatcttagtaaactctttaaaagttttcaagatctgtcttcttcagtcctgtaaaggctggcacttgagctttctgcaggggcatcttgggagctactgtcagaggagagagaagtgggaaaccctcacgagtggagctttgtctctccccactccaaatttcattcaaagctgcccgtagttttattaatatgttggacttttccattaaaatttcttttttaagaaaagtttccatggcttaaaaaacactggagacttattagactagattatatccaatggccttggcagttgtaacgattctgcaaactgaaatttgttggagctagaaaacctttccccggggttatttgccctgcgtggggccgtagcatccacttcgggggctgggcagactgtgctctgttgtctgtttccttgcagccgtttaggtttaaatggccacaaaatgaaaactttttcacccctaataagtttcagagttttagtttccaagtgaggatgtcattataacattttaaccacagacagtctgaaaataatgcagagaatggggaattagggtttttaataatttatgacaccctttgcgtaacatttgttcatctcatgagctccaaaatcgcagccagcagttaatcctcaggaggtttatgttcatttttctggagacataattagtcagctgaacagttttggccacagatatgagatacgttgagtctgatttatgcagcaaactttcattgaacactgctgtgtgccaggcctgggttgggctgtgggaatatgaaagcaatagttatgatgaggatgattaacaatattaacagccacttactgaccacataatacatacctggctgtgtgcaggagttatccatgtgttatttaatccctaaaactatcctttggcgtgagtatattttgcaacatctttactgtggtatacctcaaatactgtacagtttatgagatgataggtattcttatccccattttacagatgagaaagttgaggctcagaaagtttaagtaattttccccagggtctctcagctagttaataacagaggcagaatttgaacacaagactcactccacagtctgggcatttacagccaggaagctaaattgactattattatcaagccatcacctctggctccaaggattatgaaatccaacagtgaggagagaaatcaaaataaaatacttttatgctatgtgttacatgtgactcttaggaggaatattcagggaattgtgggaaaagatagtgattaacttagccagtggtcatgaacagcttcatagaggaggggatgtttgaaaggggtcttgacggatgagtaggaatttgccaggctgccatgggaagatttcttgctcaaccaagaatgcaaggaccacttttgcttatttaaactttgatggcttttgaagccatatctggctttttgagcctctctactttacctggcccataaaagagaggggaagcggctgcttctcttgtctacaggagtgtcacctttggctctagcctgaccataggctaccccagaatacccccattggcgatcctgaagcagcatggagccagttgttaatatcagggggaaatggcacaggccagagcccttatcagagtgtccacaccacgctcttcttcctgtgtttcccaaaacccttgtgggattctgctaaggagagagctctgaggcaggacgtgccaaagagatggcgaaagcacttagaattttagttcatctgaacgttatcattgccgtttttttctctttgtttatacacaaaccctggggtttattaccgtctcattggaatgctcttgtcccagttacttagcacacaaatccctgagacagatggccctgcctcagtggcagtgggccttatcagatttaatattttttccctgcagcccaaacacaatcagaaaatttccgacacagaaacaagagttgaaagtaaatatagtctccagtgtccgcaacaaagaactctccatcatgtggttgcctgggatgtggcttaattctcatgtgggcttctgagctcagaaaatgggggaaagggatcatttactgagatcatttggttcatctcccagcccccaagccattctaatccagagagaaccgagtgctattctggtctttatgaatgacaaagaaggaagctccctagctacatgttgcagtgtttcacagtctgggagaggaagccgttttttctgcccagcctgaatccatcctgcagcagttggcacagcgaggcacctgtggtttattcatcatcactcttccttcctaagatactcagagttggcaagaaacatgtcatccttggtatccgcaaggacgaacatttctgatgtcctctttagttactgaaagtgtctgtgacttgccagatctttgatgctcctgtcaccccgctgccactccccagggaaagctgggacccaggttgggctctgcctatgatctatagctctttccagcctcctctccaacccaacccctactcccaatctgtcacctcccatggatgccactgatctggctgaaggacaagagaattagattcataatgagctgctggtgtctgaaacctgccagcactgccctgggctatcagttgagccaaaggaagaaggaacagtctgggtttgatcgaagggctaaagcttcaaacagcctctaagtctcagtaggaaaatgtgtaggtttgggagggtgtatgtgtttccgaatgagttcccctaagaactgcttatggttctatatgtgtgttctgtttgtccctgtgtcttttggtgtgtctttttctgcgtgtgtgtgtgcatgtgtgtgtgtctatgcccccgtttggattgccatatttgtggctatcattatgagtgacttaatgagtgtatatgcattggtgtttctgtgactttgtggttttgatgcatgggctggcctcttcataaccatgtccatgcagctggtctggcctagagtacctgccttcaattcactagctccttcttggccatcaagactctgctcaaatgtcacctgctccagggagccttcacctggttgaattagatgccccttatctgtgctcacataacatcctatcaaagcgccctgtttctttccctgacttgatcctctgtcccctattgcctgacctctgtgtgcccagcactcagcccactgcctgacacccaggagatgcacgggaaatggttctgcaaagaaggaataatgcagcaattactatatattgagtgcttacacttactgttttttcacatgcactgttacattgacttctcataacaactctctgaagtcccttcatagcctcaccttacagatgaggaaactgaagctaagagaggttgaggaacttacctaaggacacagtggctaatatatgatgagtcaggacctctaagtccaggctcttaaccaccgtgtcaaacagtcttgtatgaatgggtaggtgtgttggtctctgggtggccaaagataattttattctttacccagggcctcccggggctgggacctacggacaactcaccttttgacacctgccaaaataggaaacaagagtccaagtgatcccctctcctttaagcaccagagaacatgtgaaggggacctttccaatcatacctctggcctggcagagacaatggggctccaaactgtagagtcgggagtgctgggttttagtcctacctctgcagctaactcatttattctcctcagcagtcacattctgcaagcctcaaatgcaaaatgtgtaataacttctgtagaaagtacatgggggcatgaagatcattggcttgattgcttttaaaaaatcggtattgagcactactggggaaatccctggaaacaaacacaattcttccctgagagcttgtgaaaatgcaagactagggcctatgattttccaaagcattttcttccaccaagtgtcaggttgtaggtccttggtcttttctctcttgccttggtacctgcagggtgctgaccagtgctatcatatcccctccccgtttcctaggaccctcttctcggtagactccaacagggcctgccttccttgggcagcatggcaggcctcttggctagtctagtacccacttcttttttttttttttttttttttggatggagcctcactctgtctcccaggctggagtgcactggcgcaatcttagctcactgcaacctctgcctcctgggttcaagcaattctcctggcccagcctcccaagtagctgggattacaggcatgcatcaccatgtccagctatttttttgtatttttagtagaaacagggtttcagcatgttggccaggctggtctcaaactcccgacctcaggtgatctgcctacttcagcctcccaaaatgctggaattacaggcatgacccaccacgcctagtcaggtacccacttcttaactgaaacttagctattccaggttctatcccttttaaaccaactctttgaagagaggtctaataatgacccaatgacttatagctgcagtgagatttttattttaacaggtcacaaaattctcaatccacaaaagtagatttctgaccctaggttattttgttgggggcggagagaggaagtcaaaggttttgcagcctttagagctgcaaaaccagaatttgttgttttgttaaaaatgcacaaataccgacgagtatatttaagtaacacccatagtctaacgaacaaacatgatcagttggcttttccagccctcattctccagcctgtgtgttttctgctcattgtaacacagcgtgtgtgtggcattccatgtttctccagagctttcatgagaatcagtggtcttggatgcatagtgttcccatgagtaccttaattacctaaccattccctgtggttggaaatttatatgggtttttgcattctccttctgctctgaccccaaaataaatgtctgtgttcatacagctattaccttatgtgaaattattttctttgggataaattctcatgatgtgttgttgctttaaaatagtggactccagtctccagagctgcgtctctgcagaggacagtgggacagaagaatcccagggcatgttaaaaaggaccgggtcttcctaaacccacatgcctatatttctgacccagtaccagccaggggggcaagtttccatcccccacaagtcacaaacctgtaactgacactaggatgcttaaggtcaaaggcctggacgaggcctagacagtgggtctggggtagtgtttttgacatcactcaggttcatgttcacatgttgtccccttaccagcatgtgaccttgggccagccactaaccctactgaaactcctttttttcatgtatgaaatggggctaataatggtaccctcctcattagggtattgtgaggatagagttttgcacctgataaatattgtctcctgccccttcctcccctggaaattcaggtctctccctgcagcctaattttaaggcccatttttctgcttccagcccacccctgcccttctaccttcgacctcctccctctgcctctccctctggtgcactggcaaatgggacagagagcctcggtagggccttcctcttagagtcttgcacgcatccctcagtggtctccctgtggctgcttcctgctgccaccaacagatacagacccctgtcgcacagatcatggtagagacagtggtgagcaggaccagacagctccagggagcagtgagggctggcttagagaacctctgttaaactgagaggccaccatcaggaagctctgatccaagatccaggaatccctgactctagggaaaggcctccaatgagagcctgggccctctctgcctgattctgattgtggatgtgccctcaaactccttctcatcactttgttccatccctctttaccctgcagcagctcccacaccctgccaaacaggatgcacagtccagggcagtgtctgagaaagagcagagatctgtcttcatggaaatattgatgtggctctgctggggagcaatggatttatcaagatcaaagttttcctgggagttattgatgcttaatttggaaatagacacactgttgatccctggtatctttagcaacaaagttaaaatgtttgtttttcttcactggttgccatctgagatcttgccggaagtacacaagagaaccttaaatttaacaggaggccctgggagcccatgaggctggcgggcttgggtctgaaatcttttcagtctcttgtaagtgatgagctctcattctctcctgagagctctacggtgccatgttttccactggccttttctgctcagtaattgctacattacaggctgttggtaagttcggaacaagggagctgctgattccatttctgtagcagagaacatgcaccgtgagacttgttgtaccagttcaggttttaggtgctctatttattcttgccccattcagaatgctctcccctgggtctgtggccacaatgctaagagtcatatttatgggcctgcagttgtaattgggccccattctgttcccccaagtggaaagatgaacagggtgtaagcaaccttccctgtagttagaaaaacgtttagttggatttatcagtctgatttttcactcataaacaattgcacaagcctttgcaagcccagagggtcttgtaataatgatggccgtggtccattatggcacagtgatgtgttctacggtggtcattttgctggcaatgacagtcacctctgaacttctctttccaacagacacaatttctcggggtttactttgtctcatcccaagagttccttgccaatgcctacgtcttagctgtgcttctgttccttgccctcctactgcaaaggacatttctgcaagcatcctactatgtggccattgaaactggaattaacttgagaggagcaatacaggtacttggatgattattttttcactttgccataagaaccattattaggaataatgtccatgagtgttattcatcctcatggacactcaagaataattctgctgtaaatttattttttgttgcccattaacgatgttttaaaacagtaaccattgacaaggcagtgtgggatagtggaaaatatcttgggctgaacttgggagacagtgtagctctggctctggttctgccttggactgggtctgaaaatccagctgctcagcccttggcttgaaagtggtagacgtcactaattgatcacagcactctttctgaccaagggtaaatgcaaccttggaatcctctctaagtggctgttccagagttctgctaccagacagtcttctttgggtgtgaaaaaaggaatgtgcttgacatacaaggtctagatagcctctaagacagggtcccctctaagatggggtattggtccatggcctgttaggaactgagccacacatcaggaggtaagcagtgggagcaagcattactacctgagctctgcctcctgtcagatcagcggctacattagactctcataggagtgcgaaccctattgtgaactgtgcaggcaagggtctaggttgtgtgttccttatgagaatctaatgcctgatgatctgaagtggaacagtttcatcctgaaaccatccctctcccccaggtccatggaaaaattgtcttccacgaaaccagtccctggtgccaaaaaggttgaggaccactgctctaagttctatttgaacccttaagtcttgctcactaatgagagtgacctatttggtctgttgggtcacttaagtctaggctcttggtcctgccttctgtgatttccttcttagagtttctggaaagatgatcaaagccagggagtgttcagggcccctctgaagaaggtgatgatgagagttgtccaagtcccagggtcttcactaggattttggttcagctatcagactagagagacatcctgattgagagtagtttaaatgggatagaagtttgtttattcttcagatagagtcagggctgacacaggagctactcaatgatcagagacctggcttcttctgtcatgttgctctgccagccttcttttgtgacttttgtctccatagccatggtgggtattgaaactgccactatatttacatttaaactagccagaagaagggacaagaggagggaacgcattttccttttaaaatggtaatacctgatttgcacataccctctcgcatcccattggtgagaaagtggccaaatggccgtatctagagagtctagaaagagcttggtctttattcttgacagctatatatgcactgctagaaattctctgtgcaaagaggagaatgggcattgggaataactagatgcagctatgcctagtgatgtccatgaagttgtggtaaaatcctgaagctaccttgttctttggaaatgttcctcagaatcattaacattagtcatgtgggagacaggagaagaagctctgcagaaaagggaccgagaggacaaggatatagcttgggctggggacaatgtcagagtccaaactctggctatcttggaatagtctgtgtgaacggtgccctcccaagttgtgcagtgcacaacctgtgcagctatatatggcaaccctgcccatccccagtggtttctcactgggaaagcagagtatttcctcagggatgtcattatgtgacaatagtggaaaaagcccaggaaaatctaagaccttctaagactcatgggggcccagagctgggaggaaccaagctgttgctcagttcagaaaacttctctagaaatcccagcctctcctcacacccctccagtgacaggcagacttgcaccaccacaagcaacagccacttttgtggttgggcagttttgtaattaaatatactaatgtgtgtatgtcataaattacattttccaattatgccaaaagagccaaaaatggttttttaatggttagcatataatcgtttttatcaaattgcttgaatctttcatgttaataagagagattcattactatgccacaaaaagcaaatactggcattaattatagaaacaaattaggggggtggagcgcaatggctcatgactgtaatcccagcgctttgggaggctgaggcgggtggatcacaaggtcagaagtttgagaccagcctgaccaacatagtgaaaccccatctctactaaaaatacaaaaattagccaggcatgttggcgtgcacctgtagtcccagctactcaggaggctgaggcaggagaatcgcttgaacccagcaggtggaggttgcagtgagctgagatcgtgccactatactccagcttgggcgacagagtgagacttcatctcaaaaaaaaaaaaaaaaaaaaagtggctcatgcctgtaatcccagcactttgggaggccaaggcgggtggatcacaaggtcaggagatcgagaccatcctggctaacatggtgaaaccccgtctctactaaaaatacaaaaaaaaattagccaggcatggtggcgggtgcctgtagtcccagctactcgggaggctgaggcaggagaatggcgtgaacccaggaggaggagcttgcagtgagccgagatggcaccaccgcactccagcctgggcgacacagcaagactctgaaaaaaaaaaaaaggaaagaaagaaggaaaggaaaggaaagaaaggaaaggaaaggaaggaaagaaagaaagaaaggaaagagagagagagaaagaaagaaagaaagaaagaaagaaagaaagaaagaaagaaagaaagaaagaaagaaagaaagagaaagaaagaaagaaaaagaaaagaaaggagttagggagaaaaaaaccctttctttctttcttttggagatttccggaaaatgtacccttacggatgagagcctgtgtcttcatgggttagagaataaccacgctttgtgcataaaaagttattaagcacaattcctgaattatacataattactagctgtcagtcagttgtgcatttctgtgtatgctggtcttcacttaataagactttatttcacagatcacttggtgtccctacttcactgaaactaggtgattatcttttgaagtctcatttcacataacctaggaggtatatagatttctttaaaaatgtcattgccattattttaaaccttacccatggtatatataaacttacagaaagacagaataggttcattattttaaaccttgcccatggtgtatattagctcacagaaagacatagaataggttcctgccttaagaaaacctgacccacaaaaaagcctgggtttacacaaaagaggaattaagggcggggagcccaccttacaacagaatgaataatagaattttatccaagagcaggcatcctgaggacatttaagacccggatgcatttttccttgttcaagagcacacatccaaaaattgcagtctttctgcgagtcatgatcactctgcacataaagcgtttaggttcagagctcggggaggccattaccatggctgctctctgtctgccctgtgagggtccttggggtggctgcactctggggatggtgctggggctgactgactcacgcggtcgtgtaacacatcagaccttccaaagtcgaacccttgttttgtttcaaggctcaattatgacaggacttggtctcagagcagatcccctccctaggctggagaaggccactttaaaacagatggcctgccccacttcatcatttttatggctctgatctgtgttctccactggcctctggtaaatcaagaatacaagtggacatgaagatctgctttaaaaaataaagaacagaccgggtgcggtggctcatgcctgtaatctcagcatttggaggccgaggtggatggatctcctgaggtcaggagtttgagaccagcctggccaacatggcaaaaccccatctctgctaaaaatataaaaattagctgggcatggtaggcacgtgcctataattccagctactccggaggctgaggcatgagaattgcttgaacccggaaggtggaggctgcagtgagctgagatcatgccacttcactccagcctgggaagcagagcgagactctgtctctaaataaataagtaaatgaattaaattaaataaaaataaagaaccaattaagtcctgtctacaggaaaaggccttacttgctggagaagtagcttgctgtgctggagtagactagtaagttggaacggtgatacagtaccaccttacagagctgctctagggcaccatggggactgtctgagaagcccctggcacactgtaacaggtggcatctggtgtggtgatgatgatgagaatgatgatgaatgtgaaacactctgctctcatttctagaccaagatttacaataaaattatgcacctgtccacctccaacctgtccatgggagaaatgactgctggacagatctgtaatctggttgccatcgacaccaatcagctcatgtggtttttcttcttgtgcccaaacctctgggctatgccagtacaggtactagatgggctgaggggaagggaggggggcagcaggacacacaaccagaatctgctggtccatggccagtaactaggagcacaccgtcttccactccatgcttgcctgtacctttcacacacttggctataccacaggctgtacctctgggtccctcctgtcccatactctgcaagcactgaccatctctcttaatgaccagagaaggcagtatcattaagactttaaaaatggagccaactttataaactatagaaaaatcaagccaggttcaggggctcacacctgtaatcccagcactttgggaggctgaggcaggaagattacatgagcacaggagttcaagactggcctgggcaacacagtgagaccccttctatgcagaaaaaaaaaagaagaaagaaaagaaaaatcgtacatggaatgcccacagatcttaaaagctatgttgtagcaaaatatttaattacatcaaaaagtgttagtgatgtatttttaagcaaaaagagtaagttacaaatagtatatgttgtatgcttactactaaactggaatatatgttatgtatacatttgtacagattcacacatgaaaaagaattggaaaatcacatagtgggattataagtgatttttattttctttatgtgtttctaaattctctaataagcgtgtataagatttggaaatcaacaacatgatacttttagcctaggcaacaaagtgagaccctgtctgtacaaaaaattagctggaagtggtggctcacaactatagccccagctactcagaggctgaggtgggaagattacctaaagtccaggaggcagaggttgcagtgagctacaatcacaccactgcactccagcctgggcgatagagtgacaccttgtctcaaaaacaaacaaaacctggtgttttttagccagatgtggtggtgcgcccctttagtcccagctacctgggagtctgagatggaaggattgcttgaccccaggagttcaaggctgcagtgagcaatgatcacgcccctgcacttcagcctggacaacagagagactcctgtctcttaaaaaataaaaataaaaacgttaaaacatggtatttttttaaagcaagacaacctttggtgctggctcaggaagaggtacattaccccccaataatcagaggagaatcgtcagcatgattgatctgacctcgggcttcatgtgtcccatctcccacccggagctcttccaccacagagtctgatcctgtcctatgcctgggactaaatcttcaccctggtgttcaggccagaaaccgaaatcccagacccattcccagagggcgggaaggttccaccgggagagcttgatgtagcagaaagtgacttgggtgagacaggctgattcaaatacttaacctctctgagccttggtttctttatctatgaaatggggaggctgcccaccctctggagttgctatggcaattcagttagataatgtaagtaacacagcaggcagagtggcccccagagtcttcacttcgtaaatatcagatccctctaccttgcacatgtttggtatgagtgaggtgttaccaatccagaatccattgcttcttgggataaagattccataaaccttcatctccagtgatttgtattggtcctccttacttgtaaagcttagagtttaaaaatattaaaagaaaaaaaggggagaggctcccacagggacacagctagacaagatgagatgcagggaatctgatgttcttttttatgggaacagtcatatatgccatcccccattaccacctacccatgcccagactgcccccgctccattctgccaagacagatcaatgactataaaagctacaaaagggcctggagatctcatctagtttagttaccaaccaaccttttatgcacaagactttctaagctgggtgtggtggctcatgcctgtagtctcagccactcaaaaggctgaggtaggaggatggcttgagcccaagagttcgagtccagcctgggcaacatagagagacctcatctctaacacaattttttttttgaaacatgaaaaatgaagatttctgaccatgcttctctcattagttaacactttgggctgtgagggtctgatgcagagagacacagcctgggaggatcctaacatgtacacagcattcaaaaggctacaagacactttctgttgtgtccccttgaacaagcagtttgtaagattttgttggccaggcatggtggctcgctcctgtaatcccagcactttgggaggctgaggctgatggttcacctgaggtcaggagttcgagaccagcctgaccaatatggtgaaaccccgtctctactaaaaatacaaaaattagccgggcatgatggcgtgtgcctgtagtctcagctactccggaggctgagacaggagaattgcttgagcccaggaggcggagactgtggtgagctgagatcgtgtcactgcgttccagcctgggtaacagagcgagactcggtctaaaaaaaaaaaaaaaaaagaaatcaggttttgtctactaaacctgctgcacggttaccgttactagtactcacagggtttgttgcacatgcatcgttgctaatagtgctaactaatattaacagcccttgccctatgcctggccctgtcccagcccccctcccttgtataatttaacccttgcactgggggtagagattttcatatctactgatttcttacctttgctcatttatcatggagtgtcctttggttttctgtgtttgtatatacctttaccacttatagatttgaccagcactcaagaaccagtgttactcctgggagttaatacaatcccagccccatggcaaagaaactcatgtggttaggattctgtgtgcagcctggttagccacagggcacgtaaggctttttataatattgacatgagtgcagaagccccattcccgtgtaagccctgagggctcttgtttcataatctttttttggtcacatgcacacagctttattgagatataacccactcatttaaagcatacaaatcagtgggttttagtgtcctatattcacagagctgtgcagccatcatcacaaatgtggaagttttcatttccccaaaaagaaacccgtacccattggcagtcactcctcatcttcgcccccagcccttggccaccgtttatctacacatacttttgaaaggctagtgaaactttctcagaaaaataaatgcttgctcaaacatttgggctataatttcaggggcttcatgggtgcccccctgacatttatcaagaacaccaggttaaggaatttagctataatggaggcctctgtgtttcccagtctcctgggtatcagaggcccagagagggcaggtgccttaccctgggccacgcagtgaaccagtggcagcaccatactcacacatctcctttctgcggttccccagtgacagagttctcaggaagctttttcatttattttctgagaggagggtaggccatcttgtattgatctccaactatatgccagccacaattctaggtgcttatcataaaggttcatttaatcttcacaatagtcctgcagagtggacagagtccttcagagtgggcattataatcaccattttaaagatggagaagctgaaaaccagagaggttaagtaactcacccaagactgcacagcaaaaggctggggctttgaaactcagggccacagactccaaagactatgtcctccccactatgctagatttttttcctaacctgtgaataggagacaaaatagtccttttatttctcacagttgctttgcacactcagaatccatgatttcttctgcatgagggccattcagacctgtgcagaagagagtaatggaccaaggagtcttgggagcacctaggaggaggggatgggggagcatgaggaggagccagggaacagcagcagctgcagcaccagctcccaccccagcctctgccagtctcttggaggtggtgtgggtgcagacaccggctcacaaggtgccctgttagtgagcttggggtgccatgggagccttcttgttgtcaggcccaacccaagctggctgaagaacaccctgatggcctccatttgagcacaactaatgaaggactggatgccagagataagtccaggagggtgatgctgcagggcaggccagggaagagggtacttcatctctatcatggtcctctgcccatccatgccagcatctaacacctgttaaacactgggaggcaggtggtgaaggggccacttcccagcctctaagatacctcctaagccaggaggcattctgtgattaaattacagggcctcccacttactcctttatccttgaggcggtgctggaagcttaatgccaatctggtgtagggctctgggactacaggaccaaggcaagcagtcctttctctctctctctctctttttagctaaggaagccagcacatctgttctttgagaaaaagccctgtatttagaggtgtctgcctttgaaggcaacctgagaaactgtcatcttggcgctttggggactggccatttacacttctcataaatattcagaagtaggcagtcatttacataaagctaaatgcagaaggaattctcttttcagggaatacctggcagattcattaaaaaaattaaagaaaccaagagcataagaatgaaaagcgaattctcggaccccaggctggttttttctggcatgggtgcagtaactttgcctctttgctcagttatcacttttttccaatgacagtaaccataagccctgagagccagcaaatagaacaaaaggtgctgtcacaaacattgtgcaatctcatctctgagatttccatctggaaaatagactggagagagttaaggcttcaaccagccttgcagataaatgcagttagttaccagcccagcaaccctctgcttgcatgagagcccattatgctaacctccttttgaaattgctttgtttctcctccttccctgcactccactccccaagataatttggaaacctgggcaccaaggcttgtcccactctaggggactggggaaacagggattttgccagcacctcctggcagggcaaccatcaggtcaaagggacctgacccatgaccccttcctcagatcattgtgggtgtgattctcctctactacatactcggagtcagtgccttaattggagcagctgtcatcattctactggctcctgtccagtacttcgtggccaccaagctgtctcaggcccagcggagcacactggtgagtgcccaaaggtgtgtgtgttttgtccctcttcccctccttccctcgacagcagcaggtctcctcccacacacccacactgtcattgactttgactttgactttgagtaggccacttcacctgtccaggcctcagcttctttgtctgggaaatggagtcaatgggggaggaggctgcctcccggtgaggacaggaggcgggcatggcagtgacagtattgacactcaggccttcctctcgggtgggagacggagcagaagcctctcccctctgactcggggacccctgcaggagtattccaatgagcggctgaagcagaccaacgagatgctccgcggcatcaagctgctgaagctgtacgcctgggagaacatcttccgcacgcgggtggagacgacccgcaggaaggagatgaccagcctcagggcctttgccatctatacctccatctccagtgagttcaccccacacagccagccctgggtgctgctgcgtacatgcaaggagagggtgtcagagctcgggtaagagggggtgcagggacagaagcaggaggccttgagattatccgactcagtaggggagcctcaaactggctctgatagctaagctcccagaaatcaaagtactcttcattcatttatccaacaaacatgcatggaaagcctgctatgtgctggacactgtgctggccctcaggatacagtgatgaggaagagagatgaagtttcattcctcatggaactgatatgttattgacagacagcagcaagtaagtaaatgaccacagttttgaactctcctaagaatgaagactttttagtaagtcagactgagctgtcattgccctggggaagctacaagaaagcttccatccacttggggctatgcaaaagaaaaagactagttatccttaaatatcagaagcccaggctgaaggtactcacaggtgtagggactgaatttatattaaccaagtagtttgggaaccccaagccaaggaagaagaaaaagaccaaaactggtaaaagtcctagagtcccatatacttgaaaccattttactgagaatgtaaaacttttttttctttttttgagatggagtctcgctctgtcacccaggctggagtgcagtggcaaaatctcggctcactgcaacctccacatcccaggttcaagtgattctcctgcctcagcctcccatgtagctgggactacaggcacacaccaccacacccgactaatttttgtatttttagtagagacagagtttcaccatattggccaggctagtcttgaactcctgacctcgtgatccacccgcctcagcctcccaaagtgctggaattacatgcatgagccactgtgcccagcccaaaagattttttagaaattgaaattttagttatggaaattaattcagtgaacaatggtcccctggtcagagtgagggcttacggaggtcaggtgatccatggagtcctggcccaagtttatctcacagttggtctcgtggctccgtggacccatcccatggtggttacttcccaagtgcataattgggatgtagatatttagcaaccagctgacttcacactagttccctgacctgtccagtctaagagtcattatggccaagtggaagcccctggaaagaagaaaacaaaaaagaaaccaaaacttactcagtgcacaggttacatgaatgagtatagctgaagagagaatttttgaattagaagacagatgagtggggattacacagaacgtggcaaggagagtaagttggtagaaccattttacagatgggaaattaaggccagaggggagtgtgttcctgagatccctcctgaggttagtagcatggctcggactagatcctccaaagtctcttaactcctggtctcaggctattttccacaaagagctgggggcctctgtggggtgaagaagacttaggacaccatggggcaccattatgaggccatttcctcctaggagaaaaaaaatctctgggctctgaaaggagtagaattagggtaggaaattaagagaggctaccgaccacctcctccaactaaaattggttcttttggtgccaggaagagacacacctggtgggggagggaaggtggtaatggagggggtgctggtagtgtctcccagatagacccatccaacaagtctcatggagaatgagacggtcactcaggtcatctgcgtattcttggcattcttgctgcctagagagagagtctgatggagctaggtggccaccaagctgtcccactccccaagacagtttggaaacatgggcaccaaggcatgtccctgtctaggggactggggaaatatcccatagcagtgttctcacagtatggggctggccatgaataccccaggagtccaacctccctttgtccagctagaccatggtgtcctatgcctcaggcagggaatgtggtccagtcatcagtggctgggccgtctgccatacatggtgcaagccatggcgttttatgcagaaagtcctgctagcatttgattttctcagaatggagctgtgagcatggcaggcaaccactgtttcctggattcttcaccaagacaccccaagttcctggtctctccccgttatcctcatccctgaccctgtggttctcagagcctccaaacacactcaggctaagcactccatagacaggggaaatttggaaggaacatctagggagctcagaaaagccaatgtccctagccccaggcccacttcaaccttctctctgtcagtcctgcctgcccctggaggctggttacatgaagagtaaccccctgcttgtgtatagccccccagttttgtacaggtttagagacagttcccagcagtaggaacagctgccgaggtgggagagggcttctcccgatagccgggggacttcctctcccaggaacaacagggtggggtagagcaggcttgtcgttgctgagatagagagagggaagggaaacaacaaggaaagtgggggcactgggtccccaaggttcctggcacagcaagcagtgaagttggggcagcctcaggtcatgtagtgggggcaggtgacatctgctttgactgctcctaagagatatgtactcatctcctggattccaaactgcagcctgggacatgttttcttatataaacagcatcaaaagatgtgtgagttcccaggctagcccactgaaccctacctagtgggtgctcattgtcccccagagcccccagaagacaagccgtggctttgtgatgggcctggggccaggaggacctagggatatgttgtgaagagctgagaagactctggaaaaaaggggctctggagccaagcaggagcccgcccaggactcctcacgtgtccaagtcacctagggagagaaacagagcagcccaggttggtccctggaagagagcagcggaggaggggaaaggggagagcccctggggagagctttgaaagtcaagtgctgtttgctcagtgtgtttgcctttccgaggatgtgtttttttttccctccgttagtcagcagtgggagggggagagagacgggtggtagggtgcagggtacctcctggctgcaggcatatgctttgagtgcgtgttcatttacctcctctggacttcctgccttctgttaccagggatcaagacacaggtcattaggcgtgaggtaatggggcatctcttgttctgacccctggcgccagtcttggagtcctgacgctgcagaggagccccagagtcacatttcctgttggggcccatcctgctcatatgcggcaccatcagacttctgggcaggcaagattacctgtgactctgtctgatggtctcgccatcaatatcactgagagtagctgtgtatggagtcccgaactggtacaggataaaacagggggctgaaaagggaatgaatgggcacagtttctctggcatcaaaagtcacatccagaattgatatttcctgttgagtaaaaatagaaatataagttgctcagtggatgttgagtgagccctattcatgtgccccactctgtgccaagcaccaggaaggagggaagggaaaaatgataagatgttctccccgttctccaggagtttatgctccactaagaagtcagagctaacatgcacagaacagtgtggcagcgagagcagaaccgtgtggccagctccatgcttgccgcctagcaagcgtgattgcacttcatcctcataacaacttggtgaggtgtgttgctctgttgtcccattttacagcagagaggactgactctcagtgaattgaaatgtctcagtgaggtcttccacagcaaaaggcgaagcacagagaaggaagtccatgtgggctgggagttcacccagagattcatgtaggggcaatgtgggctgtaccttgcaagatggtgggatttcaatgaggagaagacaaagtgggaggaagctggagacaaggactgtggtctcttcctttagaagtcagttcaatctttttttccttgtggaagcagcataactctaggtggttcctctgtatctgaggacaagctttgtagaggtgacaaaggggtcctaggtcctatcaggcaagcactcgatatgctgccagttcattctgtccattgtgagatacccattccagagcgcttcctctgtgccaggctctacggaggttctggatgttaaagaggaagcaggcatggccctggccctcccagtcttgtgggagattgatcatgcccatgaatagtgaccatgtggtcagagccacagggtcaattccaaatgcccctgtttctcttttgtgttactcacctgactctgggtctttcgtttcttccattcattttttttaaacaaatatttcctgcccaccttctgtgtgccaggcctggggatgcagtgggagaagcctctgtcctcctcagtggaggcgctaactcagaacaggcagtggagaaaaacaacatgacctggagacctggtgccccttccttccccagcatctttgaaattcttttggttgttgttgttttgagatggagtctcactctgttgtcaggctggagtgcagtggcgcgatctcaactcactgcaacctctgcctcccaggttcaagtaattctccctgcctcagcctcccaagtagctgggattacaggtgctctctaccatgcccagtaatattttttgtatttttagtagagacagggtttcgccatgttggccagcctggtctcaaactcctgacctcaggtgatccacctgccttggcctcccaaaatgctgggattacaagcatgagccactgtgcctggcctgaaattcttcaatatctacctgcccttctgccagttggtgcagccacagtgggctgcttatgcatatcctggcctggcttggtggggagcatggctgagggagagccggggcacccatcaattaaggaggtaaagatcagtctgactgagatgcctcctgccacacttcctcagctgccagcaactgacaccattaacctgatttccttccccctctgttgactgcactgactattggactgaatgggaaacagccccgtgcacctcaaaatgcacttcccctcctgcagatgcatcttgcaattaggcccaaactgtgagcctgcatgctcctcccctggccctgcacaggcaacaaagctgaagttaatcagaggtacaaatggctggctatgcctctctgacacgtaacttctggaacatgtatcaatgctttggaaatgaaaagctcctggtattgcaatgccaggctggtgcccataagggccagaaaacattccttgggcaaagccagggggagtgggtgatctgatcccagctcaggtttgttgatttgttgttttgtttgtttcgttttgtatggggcaagggttgagggtatgaaaaacttacactatcatttactaccgtagtccccagaacccagcacaccagcacaaggcctggaacagggataccttttttgaatgaataagtctttttttttttttttttttttttttttgagacagagtttcactcttgttgcccaggctggagtgcagtggcgcgatctcggctcactgcaacctccgcctcctgggttcaagcgattctcctgcctcagcctctcgagtagctaggattacaggtatgcgccaccacgcctggctaatattttggtatttttagtagagatggggtttcaccatgttggccaggctggtctcaaactcctgacctcaggtgatccacccaccttggcctcccagagtgctgggattacaggcgtgagccactgtgcccagccttgaatggataagtcttaagggatatttttggaaaggatattctaaaaaatacccatgtctctacactattgcagaagggctttcagttttgatggcagcctttcaggccagcctacacgcaactaaacttttccataacagcatcacacttacacaagaagaaggttttataatccacttgccattatttaacatagttcttcctccttaactttcaagatctgagcactataatgttcttctttttgtttttgtttttttctaaatcaaattaaggtgagtcacctcaccttgggcctgagttggacagaaatctattcttggctatattccccacccctccaccaccttggaaccttatagaactttatgtggttcaggaaaatgagggcgaggcctcagatcttcaacccatgacagctgtatgcccagctccctgccttcctgtcttacccccagctagggcacaggactgactattgtgcccagagaggtgccagagcctgtaacaaccccagacttcccaggtccagccacatccaccccagagccccaaaagatgatcttcagagagacctttaaaacacaagtagctggtcacttccatccagaccagaacccaagatggctgtgctcttgctgagacatgttggttgtcattgcctccgagcccactttagccctcagctctgtaccagaaatgctgttcctttgggaatcacagccaaagaagagatggagcagttctggaataagaacacaagttcaaactgtcccatatctccccacatcactatctacagttggtctcttcccatggcgatgtccatctgccaccgtggcactggtattgctttgagtgcaggggtctctctttttggcatgttggccctgttactccctgggaactttgagtcttatttggaatgcgtgaagtccctgtgtccggggccagcactgatccacacagctaagtttgcactcatcttccctctcatgtatcatatctggaatggggtctgacacttgatgtgggacctaggaaaaggcctgaagattccccagctataccaatctggagtggttgtcccggttcttactgtactgtcctctgtagggctggcagccatgtgaagaacagaggttcccagcatcatcttcctacacattattacattcacccatctttctgtttctcacttttatctccagcctgggaaaagttctccttatttgtttaaatccttttgtgcttttagatccccttggagcagtagagtaccttgtagaccataagagtggaaaagggtctagttttctccttgtttctaaagatggggtggctgaaaaaactccccttttttgcctacagcttgcctctctgggcctagaagtggttattctgtctccatattggcctttgatttgtgctgagggtcagcttttggctccttcttcctgagacagtggaaacaatgccagctgtgtggcttctgccctgggggctgggggtgaggctttgggtgccactgcctgtgggttgctggcttaaaggacaattctgttcattggtgagagcccaggccattaacacctacgcagtgttattgaaagaagagaggcgggggtggaggggaattagtctatcccagctagagggagataaagagggctagttagttcttggagcagctgctttgaggagaaaatgtatagcttttgacacaacaggaagatccagaaaattatcattgaacatattaaaggttatttctttttcttgcaaaacacacacacacacacacacacacacacacacacgcgaacacacgcagctgatgattctactctcccagccccagccctgaaggggacccagaactccctgcacaaaggctgtccttcaaggggagggtgaaagaagtggaaaatcacattttcattctttagcgtctccatacaacagccagaactgggcagaagctaattatatcagaagcatactccatgttgctgcatcagctttgggatgttcatttttaaatttatttatagcttgtctcattcctcaaaggagttcagggagctacaaaaataaagacaataaaattgaaaaaaattaaattaaaaaaaccatgaccagggaaaatgtgcagtagaatgaagtgtcaattatcacgttttctgactgcaaaatctcccccacggctgatgcaccatcatttactacaacagcccctcttgttggacatttccagtttatttcgtttgggatggtttgttgctgttgctgtggttgtggttttgttttattgaattttgtgttagctgcagctaataccatcttgctgatggctttgcgctgctcttgaatgattactcaggataaatttcctggagacggattataggatcagaaggtctgaacttctgtgtggctctagctacaaagcaccagattgctttccaagagcgttgtagcaatttataatccaacactcagcctattttttggctgggagtcaagccccagaatgtgaaggaggggtcttggcctggagcaggggctgagggatgggtgcacaggacccctccttattggttatttatggggatgggccaggaggagcagaatagaggcccctgccctcccagttgctccttggagtgactgaccccataggggaggggcgaggctacctcacatttagaactatgtagttggtgatggtcaaggtcctaggtctgatgggcatcctcctccctctcctcctcagccagtaatggctgcactatgtcgtatgtcctagatctgggtcccttttgctgtgggaacaccaataatacttacgctgtttcctgccggaaacggtgcaggagggctgtggcatggtagtgggccctggaaaccatctagccttcatgaggaagggcagttaaagcacaggcatgtatgatgttggtattgattaaaagcctcacgggcagagaaattcgccatctgccagggccccagccatacgagggctccagccatacatcctccaggagactgggacctctccaattgcaggagccttgccttccccatcagattaggaattccccgaggatggggacaatgtccttcccacctgcttgagaactcctaaggggcatgtactctgtctccccattgtatctggaacttcctgggagcatagctcctgtctccgtcctcagactgggaatcccctaagggcagaggccatgtccttccacccacttgggattccctgaagttggggaccacatctctgatgtacaatgctttgtatgtactgactgctgcaggattcttggagtaaatgggcagtcaacttcttggactggtattgaccatctggacttcatcagagtgtccaagactttgccattcattagacaggggccatgtgcacaggcagagccctggcctctggcttctggctcctgactcctggtccctctgctttaatttggctaatggcagaaccagactcctttctgggctgccctggaaggggatccttgaatgaaagaggatagatgggaaggtggcagctgacatggttacctcttatgccatgggggggctgctctctctggaaatttaggcctggggtcagggcactgttgagcattttacaccctaggccagaggaggggtgacctgtggagcagggctaagctagtagcccatgaggtatgatgtgtaggcagcacctggggctcacagagcctgttacccatgttatctcctctgaccttggaaagagctggggtgtatgaacaagtatttataagtttacaaaaatcatatgaggaaactgaggcacggggaaggtaaatgacatgccctaggttacacagcttataagtagcagggattctgcccttctgtcacaccaagtcccactgtcttttcttcctggagtccctgtgactgatctaaaggccacatgtttaacagaataaggaggaggcctctgttgcagcaaaccagctaccccacccgcacacagactctaagggacatcctgctttaagctgtccttagttactaatacctcagtgagaatgagtttgaaattttctcaagagccatgggagactaggaagtctctaagcttcatagagagcctggcttggggggacacaggagccaaaggcagaggaagaagtggcagctttgtgcccccagaaacacgtgctcctgacctcacagttggccacagccagccaactctcccatccttctcccaccactttcccgtggggctaacttcaccctgtccacacggagtgacttaacagtttaagccccagagtcgggggccggggtacctgggacaagagtcctgagggaaatggggtgaggaactggaagtgccacagggctagagttctgcccctagcctactggagctgtgccccacaggctggccccactggactgcgctgcctccaagccatcctgggcatctccatgtgtagctgtcacgctcctcccactaaacgcctccctgtgcttcctctgcagttttcatgaacacggccatccccattgcagctgtcctcatagtaagtggatcctttctccatctcttgggggtagggtggagggggagggcgtctgcagtgacaggctgcccagatttggcctttctgcacaggggcctcagaagacaggctccacagccagactgaaaataggatcgaaagtttatagagggtgtggcccctccccaactccagccgaacaggggcctctgcctccaggcctggaagaccggaggcttagtatttagagaaattaaactttcttttaaaaaatagctatccaaatttttaatttttaaagtgaaacatgtgtattgtagaagtgatgggaaatccagaacagaaagctcaaagagaattaaaatcacccataatcccactggtaacatttttaatgtgtttctttccagtctttttttaaggcctatgatatgtcattttctacaaaaataggaatgtgctatgcatgcagttttgcaacctgctcttttaaatttaggaatatgccacacacaattctccatgccactgaatattatgatggtggctttctaaagcaattttgataaaagctgtgtgtgagctgagccatgggggtcaagcagcatgctcctacagaaaggcctgggcccctacgagcctgcagccccctcacccagcctcccatccccatcttctgtgatggctgcagttccttaaaaagatctgcttatttcccccggggccagtgtccctgagctgtgtagagttcacagcctgtcggatacacttgggaattcacttccaatgtgatgtattgagctggttcctggcctggctcctgggggaactgtgggtaacagaggccactgagccagccaggtggctggggcaaagcactgtgcagtttcgtaatcactctgtttacgttatcccgatgaggactggggagatgagcaccccgcctgctgtctgcagagggggccgtgctgacctaacccgagatctcctccctgcttattcccagccaagactgggcaggacagggagtcttggccaggacagggagggagcagcccctgctctccagcttgaagtcctgaacttgttggggacgtttccatgagatgactgtggggatgatgaaggtgtctccaactaaaagatcctcttaggagcctgctccctgacagccctctcatttcccttccagtgctgagcgtttccagtgtgggagggacccacaccctgggccaccctggcctcacttgtgcctctgtccacagactttcgtgggccacgtcagcttcttcaaagaggccgacttctcgccctccgtggcctttgcctccctctccctcttccatatcttggtcacaccgctgttcctgctgtccagtgtggtccgatctaccgtcaaagctctagtgaggtgaggggagggtccgggcgagggcactgggcaggcaggtcctgtgtcagcctcaaggcttgctcgagtgatggccaaaccacagctgtttggtcccggaacacacccccattgctgggccttgctgtagctggtcctggttggtcagagggacattggcctgtatggtttcccagctcgccatccctgagcaaggacttgcttacatacctcccaggagaggggactcactgtcactttcacgacaacttaaaaaaaaaaaaaaaccagtgttgagccaaatgtggaatcctcctaaattctacccactggtcctaacttcaccctccagagccaccaagaatgaggccatcccgtccccacgtggctgccccatggatatcagaaggcatccactgtgtctatctttcccaggccaagtatcccctaccctttccacagcccctgagccctcacagcctcagccagtgaaacagcttcccccaagcgctgggtcctgctctgattggcccacagctcttggaggctcccacttccaggctctagagcctcatggggactctgccactgtcccagaggcattgccctcttgggaatgaaagcctgaaggtagaaggctgaggctttggctgggaaatgccctgtctggagtgagaagatgtccttgggcctctgaagtagctctgcctccttgaaagcaagagcctgtcatgcctctatggagggctggcttgtccttacccatggccagagaaccagtcagtaacaaatgtcctctgtgtcttcagccttgaggaaggtgacacccctgtctcatgggaccctggcaggtactgggaagctggaaggaaggagtagctgttggaatgaagtagctgatagagagggtagcttgcagggggagactctagcatgggttcaaagatggaatggggcataactcagcaaaattatgctctaaggagtatctgaccaggcagtagctggttaaacagggattagctcccatttccacagtcggctgtgctgactcagtttcttgaccagggtgttgtggggtctgaagatcacccctcctcccaccacccactctccagccctatgattctgtgtagaaaccacagatttaagaacgctgcacctgcctgaaaactgttgcactgatcccaaagcgttcatattttcaaacactctggatcccactgtttccaggaatggaacaccagagtagcagaggccttttcagtgaggcagctcaggctctggctgaaggtgggcgcaggacactacctgaagcttcaccccaagagatgagggccagctccactcttcccagtcaccgcctgtgggggagggaggctggacagggcatgaaggcagagcctggtggtctgcccctcccatctaggggtggcgcacagaaagggagactccaggccacagctcacttacaccccagaataaccttgccttgagggtgggatggcttgtctgccccaggcctgttggacatttagcaaaagagaagaaaggggaatacaaacaatcctgagcttcccagaaagctttcacacctccaggatgggagagaatgaactagaagagtgaagcttccagtgcttcctcaggtccacagggaaatctggacaggggagagggtaggaatagccgcctcccccgtgagtaatgacacctcctccagcaggctgttatggggatccgattacataatgctacaaaacagttaacacagtgtctggcatttagtgtatgctcacaaaatactagctattgattctttaccaatcctagtcctaactaaccttaaccctgaccaatccaacaccaaccatccttcagtctaataacccagactaactaacttcaacattaaccctaaaactaaccaatctcacctccaatccagaccccagcctattccagctgactggtcaaccctagcaaaccctggtaacaccaattacctgcccccatgcccactggtctgcccccttcagtgtgggctttgtgggactatacttcaggcctgagatcctgctcagagctctctatcaggctgcgccctctcccctcccctctgcccctggcaggggtgaggggtgtctctgtgcttcccgagcagcgtgcaaaagctaagcgagttcctgtccagtgcagagatccgtgaggagcagtgtgccccccatgagcccacacctcagggcccagccagcaagtaccaggcggtggtgagtgcccggcctccccttgctactcccagcatggtcctctaaggcccaaaacttgggcctgctgtgtcggacttctgccttttttcccaggaagaggggctcccttccctacacagctcccagcccagtgggtcctcacctccaaaccacccccagcccctcagggttgtgaaccgcaagcgtccagcccgggaggattgtcggggcctcaccggcccactgcagagcctggtccccagtgcagatggcgatgctgacaactgctgtgtccaggtgagtcctgctgccccatgcctggccacccagcaccaactcccagagggagctcagcacctggaaagccagaaagctgcatgcttagtcctctgcagaggtcaccctgcctgcctgtacggtccataggagtccagaaaccagggaccaccaagtggggggacccccagccttaggcaagggtcagcatgagaaggccagtctcccactcccctgctctggaagtgatccaggggctggaatcagtgtcttttggctttcatggaggaggggaagccagagactattcactgggaactggctgcctttctgttctctcctgggcggtgggacacgcctaatgaagatcatgggaggctacttcacgtggaccccagatggaatccccacactgtccaacatcaccattcgtatcccccgaggtatggcccagtccacccctccagcatgcccctccccatgtcccactgaataacatagagataaaaagacaaagctgcatttattgagcacctactctctgctcattcttggtgtatgccctgggtatattatagaaggggaaggctacattctagaggcttccgtgtgctgggtgggagtgaagcactaaggacagggtaaaattgccagccttaatgtcaaaccatccattgcagacagtataggtaatgcacaaaaagatcagaagtgggtagccaaggaacgcaagtggaagtgatggggtttctgagaatggacaaaggccctgaggccatgaggcaggaggattttctggcagaggcagccatgagcaaagtatggaggtgggttggaggtgggacccaggatggtgtttcttgggaccacaaggagcctgggctcatactaggagcatgggaaaggagaagcgagtgcttaggaagggtggcggggcaggaaatcagagagggggaaggacctggggagccagaggaggatgttgatttccagaaggaaaggattaaagagggagaggacttgctggggattctaggtaggaagaaagaaaacaggggccccagggttgggtgcatctgtctgtctgtctttctgggtaatggttgttcagactcccccggccccactcacatctgccaccctccctccctgcaggccagctgactatgatcgtggggcaggtgggctgcggcaagtcctcgctccttctagccgcactgggggagatgcagaaggtctcaggggctgtcttctggagcaggtaatacatgtatcctcagggcccagtggaggggaaatctccttttaaccatcctcctcagttgaggatgcacacacatttattggagggcccactctgtgttcagtgaggactcaataaatgctgctaatggatattctcatcatcatcactagtacgtattcacctcttactatgcgcaggttctttgctaagtcctttgcatgcattatttcatttaatttttatgataactaacaaggtccatactgttctcaattctcatttatagaggaaggttaaactatttgtcctaattcacacagctaataagtggcagagctggaattgaaactcagttctgtcagactctgaatcccatggttactcagatgcacggcagtaatttcccagtgtgggaaattgcaacaccaacattggtttccagcttggtcctgagctgcactgacctacacaccataagtgggtgttctgaagatccagatgtaaccaataaatgttggtttctgggcaaagatcactgtcttaattaaagagccagaaccccaggctcagtcaatcacgaatctgttatttatacccacctacttccaagaagcacttgaaactagttgatgaaagattcatgtaaaaatcaaaaccacaatgagataccatctcacacccgttagaatggtgatcgttaaaaagtcaggaaacaacaaatgctggagaggatgtggagaaataggaacgcttttacactgttggtgggagtgtaaattagttcaaccattgtggaagacagtgcggtgattcctcaaggatctagaaccagaaataccatttgacccagcaattccattactgggtatatacccaaaggattataaatcattctactataaagacacatgcagacgtatgtttattgcagcactattcacaatagcaaagacttggaaacaacccaaatgcccatcaatgatagactggataaagaaaatgtggcacatatacaccatggaatactatgcagacataaaaaaggttgagttcgtgtcctttgcagggacatggatgaagctggaaactatcattctcagcaaactcacacaggaacagaaaagcaaataccacatgttctcactcataagtgggagttgaacaatgagaacacatggacacagggaggggaacatcacacactggggcctgtctgggggtggggggcaaggggagggatagcattaggagaaatacttaatgtagatgaagggttgatgggtgcagcaaaccaccatggcatgtgtatacctatgtaacaaacctgcacgttctgcacgtatatcccagaacttgaagtataataaaaaaagatgcatgtaaaataaaaccctttaaaaaggtaagaaaataggaactgagaaatgaagagggtaaaaagatgttcagcaacctgggcagaggacaactacagccatcaacataaaacctggctctgtgccctctggtagccaagggaaaaagggatctctgggctttggagtattcatttaggaataaaagttgcagccaatcagcagaagggcaagctttccctaccaatcatttctaggggaaaattattgaaggtgtcaggtttttcataagcatgagtacagaactgagcagggagaaagactttgggcccaatgtctgaatatcaacatgcacccccgtttcctgcatttccaagatgtccctgaatggtgtatccaaaagatggcaaatttccctcctcagtggggtcgtgggctagcagatgagccccttgggtttcccatcacctcccatcagggactgtgatgtctttgggggcagaggggtctttgcctccattcgccattttatttgggagatttttcaacatagcctgactgggaaggcccaggtattcggtttgagatcatattgccttattccgactgcctctccagcctttggagggaggagcccttttctgctgtccaactgcatgcctgcagcaagaagacaagagtccccagtgcactgtgagctgaagaaagtaaccaatatttattgggtacctcctatgggccatgccctttgctaagtgcattgtcaacatgatctcatcaagcctcctactaagtttaggaggggagtgttgttaccccatttcacagaagcagaaactcaggctcagagaagttgggtgacttactagtcagtgtgtggagcagagactctgcccatgttctttccctcaaacctggtcactgctggggcccccagggcctagtcctaagggttattgtccaagccccatgtagtggtcaggctggatctgggctctcctccaaggcagggcttttccagaaggattgcagggctcagacactggagctgcccctgccttgacctgctcagcatggatgtcaaaacccactctgaacctggtccctttgccctgctttcttctcctcccccaccctcatgccctcatgtggcatcgtgcctgcctcaggagctctccttgtcctatgtagatgaagcaggcatgattggcaggggtctgctctgccctgcctcagtccccacctcttctccaagctgtgccaaccctccgggtctgactgctgcccctctctcttaggaaacctctgccccagcccagggaacacaaggagcctctccaaggcagaggaccctaagcacttcttttttttattattttttattttattttaggttctgagatacatgtgcagagtgtgcaggtttgttacatagctatacatgtgccatggtgctttgctgcacctatcaacctgtcatctttttaagccccacatgtattaggtatttgtcctaatgctctccctcctcttgcctcccaccccccgacaggctcggtatgtgatgttcccctccctgtgtccacgtgttctcattgttcaactcccacttatagtgagcacatgtggtggttggttttctgttcctgcctaagcacttattataggccaggcactgtgcaggcacctcatcatctcagtcagtctgcaccgaactctgtgcagtagatattattatatcctcatttatcagattaggaaactgaggtgaagcaagttgtccaaggccacccagctgttaaatggcagaagtgggatttgcacctaggtgctcaagtgcattggtttgccaccatgtgctcaaagagaaggggcacaagagcctcatgaagaaggcatagctagcctgacagtccaaaggccagcagccgctgtggccatgactcacacacacctgcctcctcccagaactgccacgtgggtcctcacagctctgtccttatcaacacttactctcctttacaggtagcctaggccccagctcccagctctgttcgaggctcgcagaggggcggtagtgaaggggtctcatttctccaggatcctctttgctctctcgcccggtcctggtccagcttccctttcaagcatagtgaagtgcatttgttagcttgcagccaaccctgggaaatcatgagaatttgttcccaagtcaactcattctccagcgtccacagtgacgtattcactcacccagttgagcgcctagtgtatactagaccctgtgacagcaacaggagtgcaaaggtgactaagacgtggcccctgctttttttttttttttttttttttgagacggagtctcgccctgttgcccaggctggagtgcagtggtgcgatctcagctcctcacaagctctgcctcctaggttcaagcgattctcctgcttcagcctcccaagtagctgggactacaggtgtacaccaccatgccggctaattttttgtatttttagtagagacggggtttcactatgttggccagggtaatctcgaactcctgacctcatgatccgcccgcctcagcctcccaaagtgctgggattacaggcatgagccaccacccctggccggccccgcttttaagagaggggagagaagacctgggccttagaagagctcagaggaaccacaattgactctgcagtcaaggagaggaggctcactgcggatgtggtatttgagccttgaaggatgagtgtggtttcatcaagtagaaaaggcagggatgggaaagggaggtggtccaggcaggggtgatggtgtgggcaaagccttgctgatattaaagaacatagttctgtgcacctggaacactggatgcatggggtgcattatgaaagatgggactgaagaagtgaacttggcttagatcccatgtagtaggtctgagaagtaagatttaacccaaaggttgcaaaagaaccatgcttgtgataaaggatgatggattggggaaacagagaaaaagacagacagactgtaggaagggaggtattagcaaataatcataacacagtgtgaggtgtgcattaatattcactcattccaagtattgatcaagaagagaggtaggtactgggttaggaaacagcttgggcaaatgcatggggaaatgagagatgtcaagatgcattctaatggcagcctcttgaagatcttaagttgtttttggttcactcatttcgcaaatgaattcatttagcaaaagcactatggatacagtgcttacctctaggaagtaagttttagcccaaatgctgcagaaggatcatgcttatgacaaaggatgatggactggggagagagaaaaagaaaagacagacagactccaggaaggaaggtcagtctgcagctccttatagtggctaggagaaggagtctaggcagatacgactcaattagcttcatctgctgtttgtctctcaaaatctagacatgtgcactgctctggctggcccacctatcctgggcattgagttaagtgtgggggctgtgtgttgagagtccccctccattactggcaggaactccacacctcagacattgagccccaggtctgcagggagaagacgtgcttgcaaagtgagctaaaagcaaaacagcctctgacctggcaagcattcccaagtctgcacgcctgcagccagaggagagggtgatgccaggctgctgctcagatgcttttcagccatacccaggccaagacctggtgaccaggcagccagaaggagttccaggaggcacaaggcaggaagttgggggattaggaggtgtagaatggagaatgctctggggagatgggtgctttgttggtgcaactattcgtttattcctccagtgaccacgtgagcagtatggctgcacacacaggctctgcagccaagctgcctgggttcacatttggtctctgtgctttggaaaatttcataagctttctctaccagtttcccttattacccatgagattgatgtgaggattaacctagcatgtagtaaatatcctataaatattattattcaatagtgtacttctttgccaggaacaaaattcacctgttcctctttaaatgtcctccagtctgtctcctgggaaagattcttgtgagctccctggggacagggaccatattttgtttgtctcactgtatccgtagtgctttttgctaaacgaattcacttgctaaatgaatgaaccaggaacaacttaagaccttcaagaggctgccattataatgcatcttgacatctctctcctttccacatgcctttgtccgagctgtttcctaacccagtatttcactacccctcttctccatcaatatttggaatgagcaaataccgttagtgcatacctcacatggtattataattatttgctaatgcgtctgtctcctccatgactctgagctccttgagggattattccatgttgtaccccaggtgccccatgcagatgtgtattttgtgcactgttctgtgtaggctacaaaggaaaaggcctagcacctgcccttggggagctcacccacccaggatggacagaggtgtgcagacagagctgcagggtgggcacaaagggtccatctgctgaagtcctgcagatgcagccccgagcttgtccctcacgtcagcagcctggctcctggtctcagagagaactgtgtggttcccaagcattcactttaggaagaatcacttgcccctccctggctctctgcttcaaggaactgtgacaaccttgggatttgcaaactctctctttaatccttaagaggaaaatgttttggtaaaaagtcaagattagcagatacactcgggtgaaattctttccctggaaataaagaatagagccattaatatccacagtagagtgactttaaatgcccccggggggtcagcaggaaccagggccctgaggaaaggatcagcgtggggaagaggctcccacttccctgtgaggagctgcacatgcagtctcactggagctccctgctgcaatgctgttgcctgtggtggttggtgtggatgctgcctgccaagagccctgattccccaggaagagagaaaaaggcttctctcaggacggccctggtcgcatctgcctgtacaattcctggagcctttggggagctgaagtcaggggctcaagtgcccctgggtttcctggaggaggcaggtgtggtgagacagctgacagacaggagaagggatgctctgaggaagtgactgtccagccatgggaaccagatggcccctggctgtagtcctgatgctgccacttgctagctctgtgaccttgagcaggttacttcacctctctgagacagactcactgtctggacaatgagtaaaaccctacctttcctgtctcagagatttggcaatgggacccaatgacatcaattggaaaggatgctgtgggtgaaaggtaacctttcaggacagcgacaagcctgtctgggcaggatgaatgggctgtggagccctgtatatcctagctcactctttgaacctcagtttccacttcttccctttttatttattgccggggtcttaaatgagtgttgggggtatctgattctccctctgcctgtacttttggggccaagcactgagctgaaaagacaattcctcctagttctccaagcctacaacctgccccctaaccagctgtgagctgtaatacattctccagtgtcactgtgaggtttgtgccttcacccccattttatagatcaggaaacagaggctcctccaagtaaaggagcttgcctcagatttcacagccaatgagtggaaaagcctctgggattcaaatgtcagagcccatatttttcctacttctcgcacctgttatcatatgctgcctcttcctttaacctgcagttccctcccttcacctccaccgtctcaatccttcccactctttaaggttcagttcagctatgacttcttctatgaggctctactcattttctcagatttcttcctcctccaaatttcttgtaaaaattatgttttttctctgattctaaaagaatgcacattacattagaaaagatacacaagcatacagaagataaaaaccacctaatatcccatcacccagaagcttccagtttttctttatgcatttgcatatgcatttgtgtttacttttccccaaaagttctccgatactttgtcctacttttcttttgacccttataacttcctgacttcggtacctttctgatttgccctaccagagtgtgagcccctggaaggcagcctctgcaccctgattcaggttgccacacatatgccagctcctagtgggctggagggaaggacatgcggttggggaactggaagactcatgctttcagctgtgtgcttcctccctagagtgcaggcagaggaggaatcgaatcccctcagcactcttgtaaagaccacagcaatgagtgagagatggtgcctgccagacataccattctttacttttcagcttaaaacagatacaaagtttggggaggctcactggaggaggcttggggctacactggaaagagaagaacttggattcacaccccagcttcccctcttcccagctctgtcacatttgcaaactctgagtctcagtatcctcatgtgtaaaatggggatagggtttatagggttgtaaggatgagatgatgagttgtttgcaaacaacttctcacagtgcacagtgaaggtcagcaatgagagccagccccgccctttcttctttccaaatgattaatatatctgttaccagcctccattcattatatagctctgtcatgtgctaagcaccatgggggctgaaaaagatgttcttcctgccttaaaattccactggggatgaacaaattacacgggagctgatcagagaggaaggcagtccattatgagggctaattgagcagtgcagaccatgttgcaaactgagttagggcctggagagcttactgtgtgctggggtcctcaggaatgccacagatgcatcaataaccacctctgctactctggaagtagtcacatcaggaagactccagagataagcttatctgggctgtggccacagagctggaatttgtaagctttaggtttctatgtctcatgttaccagcttgtctataaattgtaaattacagccatctgatggttagggaatatgaagtttggttaagagaatgaaatgagaccacgaagattagagaacaggaaaagaggggactggggactacatacccatcagaatcttcattcagtcctgaccctcagcaggagggggatttcatcaggctcatttccatccttgatttcgtccatcctggttctcctgacaaggggcatttatcagagttatggcatgggaaatcacaggggagtaatgtaccatggcatttaagagtatgaacgttggagtcggagctattttctccgctacttactagctgtgtgactttgggcaagttacttagcctttctctgagcctcactttctttatctgtaaagtgagggcgatcagaataaacctccttcatatggttattttgagctttataaagagacaatactggctgagcacggtggctcactgccagtaatcccagcactttaggaggccaaagctggaggatcgcttgagcccaggagttggagaccagcctgggcaacatagggaatgagactcctgtctctacaaaaaatatacaaaaattagtcaggcatggtggtacgtgcctgtaatcccatctactcaggaggctaaggcaggaggatcgcttgagcccaggaggtggaggttgcagtgagccaagatcacgccattgtactccagcctgggcaacaggagtgaaaccctgtctgagagagagagagagagagaaaatactactatggtgcttataaaagttcaataaattttagctgttgttagtattattaaagtaagatctgtatgaaaataaagcagattttttcccccaaatgttcatgtcagaagtatatatttcattggcaaggggctgcttctggaaggttgagaggtatcctgggggaggggatagagcactggcaaaattggcatcacaattcaagtcacctcactcagtgttttttaagttatcaaaatccacagtatgaaaagcatttgacattacagtccactatatttatgcatttataaacaagagaaaaaatcacgaaaaatacagtaccacgtgcagtacacactgattccatctattctttttttttctttttcctcaaatgcacttgccgcctacttattccagacccaatgattgggtccctatccacagtttggaaaacactataagaaatgattgtgtcctctcactttccctctctgggatttagttttccaactataaaatgctcctgatgcccagccagcctcaccgctgctccgagtcaatgccaggaacgctgatttagcacatgctatttggagggtacccatccaggtgctgtgggagggacagagattgagaagagtgctttctgaccccacagaggccatttggaaaccctgggaatgggtgggagggttggaggtggggattgcttctcccctaagactcagcgtgatggaaaggcaatggggtgggaactaactggtgttggtctgtcccatttgtgtcccagcagccttcctgacagcgagataggagaggaccccaggtacagccttgggactgggtcagaagtgggtctcaacaaagggaaggggtagggtgggggtggaggacttgtgggtgggtaatgctgagtatggattcagggatgtgcagcctacatattttcagagacatggggctaaggcctgcattctcaatgagggcaaaatttggttcttggggacagaaaacacttagacattgcaatgctttgtggctgtccaaagtaccaaacagatgccagtatatctgtggtgctgaaatttcatggtgaatggagtcagaaaatagactagcgattgccagggtctggtgggagagagagggaagggactgccaatgtgtatgggatttgttttggggaagataaaaatgttttggaattagatagtggagatagttgcacaacctggtgaacgtacttttagtttcagaggttttctaaacctctgatttttttttaagtgacaggaaagacagaaaaaagtatatctaaaaaggctctaggggtgatcatggaaaagaaagttaagaaatatgactgtaaggaaaggagatgggtgtccctcaggccaggcagaaaattcagtcttgttgctttatgttcatgtgcaaatctaaaaaatccaagtgatatagattaatgaggctctgagtccctcaaaaccttccctccccttacctctccaaaaaacacttgagataccctagaggtggtatgaagtcaggatgggaaggttggctcagctttgcaaataagtttaagcctctggcctttgctctccaacaccaaagaggcttcactttggtatattttctctgccctttctccctccttgtccccaactgtcagtatgtgatgacaggctcagcctctgtaatggtagtgatcatatttcttgagccaaaaatcagacctcatggcatgtgacaagtttgcatatgtggatgagaacagagtggcagaatatttgacacgggagcagcttgggcagtccagggcacatggcactgcacctgacatccctggcagatcccccacattccgtggttgtcttctgatggggccatatggggctgcagatcatgcctggagccctcgcagctccagggctgcgggttcccagccccagagtgcaggtgctggtgtcagcctgcctggcctggcctggctctgtccagagcactccttgccccagctgtttgtgcagctgtatcagcctcagacctcagcctattcattccaacctgaatgcagaggctgggtctggaggagccacattgcgggcttcatactcctgatctgacaagttttccccccagagcctgcaccaatggcacctctccccattctccctcttaactgggtcctccagggccctcctcacacacccacgtggtcaggcagcagaggcttccccaagatgggcacaccccactctccacacctctctatgcagcatttgtggctacagactgggtccaggggattgtaaaggcatgctcatgttgggttggagggagctcaggatcttcctggaggatatggttcactcccatgagagctcagtatgcctttcctcccctgctgcagcccagagcgggagacagcgaccgacttggatatcaggtactgcgtcctgggaacattgccccccagggtcaactccctccagggtgctctcaggcccaagggagccacatcaccctgctgggcagcccccagaccccagccccagtgttgggggaggccagggagggcccctgtgctccaccaggtggctcgggagctgctgctgtttctgtgcatccatttactcccttcacataagatcatttttatctgggatctctttttcttttttcttcaaaaaccacatcactcaaaatgtggcttccttggctctgcttttaaaaaaaaaaaaaaaagttcttccatttggagaattacctgctgacttcaaagtccagtggcttgagggctacccaaagagggaggaagccagaagttgagtgttcccttggtttggtcacacttttgggctcctccctgactaaggaacaacagactgcagggctggggcaggctgggtgtagggcagggaggggatgaggtcctgctgccccagtcagttgagacccagacctctcaaacctgcctgggggaaggcaaggccaccagaggccacactaagcagatttctaccaactgcacctccccatccccttgcctccatctgagccatcagcttgacaactgcctctgagaacaagcccctgagaatgccttccgcaccccctactcccgccctgctttttccaggaagagaggccccgtggcctatgcttcgcagaaaccatggctgctaaatgccactgtggaggagaacatcatctttgagagtcccttcaacaaacaacggtaaaagcctgtcggagggaggcaggatgtggaggggaggaactgtctctggccagcctgccccagttccgggcccctccatcgatcacccacacccagccatctcactccccaggtgcttacctgcactccagcctctccatatggtgcacctggagaggggccaggtgtgcctgagcattggggcaatccagctcccataggggagagggcaggaatggagggaagggagagagccccgctgccttttctctagctggtgggagggctagctagctctctctgtgagtctccattcgcctggctcctgcactattttccctccaatgataatagttagggctagcatcgactgcgctcttactacataccaggcacagtgccgagctctttgtacacggaatttcctctcatgcttacaacaacctcagtaggtagatattattgttattcccactctacagatgaagaaccaagtttcagaaaggtcccaaggccacccagccagtaagtgaccaagatgggtctcaaatccaaagctgcctaacacctaagtacatgtttgtcaccaacatactctgatgcctccatgaactctggctggcacctgcccaggctaagggctggctggggaagtatgagaggaacaggctgggcaaatatttgaccagccatcatcattactgcctaaaccaaccagcagtggttttccctgcagtgccccaagcacgggttccggctgcagcttttcccactgcacagagatcatgagcgccctttcatcacttactctgcatatttgttcccaaccaattccatccttctagtatttaacctgcccaaacgctgtgtgaagtgctgacctcagctcttttcaagctcacacggtgtttgcttgcacccaagcgggaggcctattaaagccattgctcaccctgggcatagctacccagagactaatgaccctctgcaagtgctcgggccaactctgaccaggctgaccagctgcatcccctgcctctacccacgccaggtacaagatggtcattgaagcctgctctctgcagccagacatcgacatcctgccccatggagaccagacccagattggggaacgggttagtagcagcctctgaggggttttttcaaagccaggacccccaacctaccatgccctgagacactactcaggacaatgggtaactaggaaataggagacattgaaggctgaagagttgcctgcagtaaggtcaaacatgttgttcttgatgatgtcctttgacaggttttcagtcctgcttggagggcaaggtcagcttagtgccctcccaggctggggatcttcttcatttgcaccccaggtatacactgagagcccacacagcactgtgctcagcctggggttgtattgttcctgttcatcctccagatggggtcccctccacaagcttagacgaacaggattctcctgtgactgtcctccttttgtgtgattttaatccctgctgcctctgtctttgtttgtactggtcagatggtccctagcgcctacacaatgaatctttaaagacttggggctcatgctgccctcttctgaatgaattcagtaaacacgtgcaagttccttctctatgcaaggtgagaagcaggcaaagaagtggatagagccaggcctccatcccaaagagctcatagtccagtagggtacaggacagtgtctcctgaatggctgagggcatgatgtgttcctcctctttggtgacagggcatcaacctgtctggtggtcaacgccagcgaatcagtgtggcccgagccctctaccagcacgccaacgttgtcttcttggtgagtgcaagttcccttggggtcctggtctctggctgcctcccaggcctaactgcccacctccacctccccgcaaccccaccatcatccaacaatctccctctccaggagtaaatccctcctgccagagatattgccttatcatcctagtgatagggaaactgaggcaggcaaggatagcacaaatgacccattgcagacttcagatggagctctgcagtagccaatgaggagaggcaagctgtagttataggctgcctgtctgtgggacagcccaacccctcaacacttatgcagcccgactataagaatggctgataacagaatgtgtgctgccacttcccatcttatgcccagtgcagacattgctaattgttcacagcattatttcccatggaacttaactcatcctcagaatccttctcaacacagcactccaggtaaccactagccatcaaacatgagataaaactaggccaggcgcggtggctcacgcctgttattccagcactttgggaggccgaggcaggcggatcacgaggtcgggagatcgagaccatcctggccaacacggtgaaaccccgtctctactaaaaatacaaaaaattagctgggtgcggtggcgggcgcctgtagtcccagctactccggaggctgaggcaggagaatggcgtgaacccgggaggcggagcttgcagcgagccgagatcgcaccactgcactccagcctggggacaaaccgagactttgtctcaaaaaaaaaaaaaaaaaaaagaacgtattcgcaatccttacactacttcatgtcaagttctgttgtgtcaggtgccttgactgacactgaagaattctaagaaccagtccttggcctcaaagatttagaatctgattagggagacagagctcacccagttcaagaggcccagcccggttcaaatccaaactgtgcggcataaactatgagggggccttgtccagggagacaactgtgagggctggagtaatcagggagggcttcctggaggagagcctcaaagggagagtcaattaaacagaaggaaagagggaggccatttgcacagtgagttggaagaaggaagctcaagtctctgattccagctttattccctcccctctccctacaccacacgcacaagcactcctttactaaagacacttcacagtgggaagattcagtctccgttaccgtctgacacacacacagcgttttacaaagcatgggtgcattcgcgatctctcatgagatttaaacaaccctgctagagaaaagtgaagtggacattttatttcagtaaacgtttatgaagcgtctactctgtgccaggcactaaacgtttatgaagcgtctactctgtgccaggcacaggcacaagaagtctcagttcttgggagtgccataatcaggaatggacaaacaatgatcagatctggctttgcgccagtgtcacgggaatagggaggaaggaagggtaggcgtgggggtcaggacaggatgcaggaggaactggtgcttaggtgagcgaaggatgggtgggagttcacaaggcagacaaaaggcagagcagcactccaggcagaggaacagctcaggagaaggcccagacggcaggcttcctgggaacctggaatgcagagtgctgggaaagcacagatgaagcatgagtctagaagggaaagcgagaggttataaagcacctggaacaccagcccacagggtttgactttagagatgatggggagccgttgaaggtccaggagtcaggcagtgaagtgattagatctgtttgagagtgatatctgacaactgccccattttaaatgaggtaaccaaggcccagagaggttgggtgagttgtccaaagccacacagctaactagcttcagtccctagagcagagttgatagaactctaatgggttttatactcattgtcacccctccccaccatgcctttccctaccctctactctcttcctctcccttctgcccaggatgaccccttctcagctctggatatccatctgagtgaccacttaatgcaggccggcatccttgagctgctccgggacgacaagaggacagtggtcttagtgacccacaagctacagtacctgccccatgcagactgggtgagggggaacaagggggtcaggctatagggggcagggctggggaggctgtcaggcatcttggcaggaaccaatccgttgtcttggtagcaactgctgagggccacaaagcataagagaccagcactggatggctttatgcatgctgggcatttcagggagaccctgtacaggccaggggtttggtatcacctagacccacagacactccccatcctggcccgggccccccatggtacactcaaggctggcaccaagaagtctcaggaataatcaagtgctcacttctcaccttctgattcctgcccttttgatgacccatccccgcagtcatggggagtgcccatttggatggaaaagccctcttcccaccctatgaccttcccggggtggatggatgcaccaccccgggaatcatatgggaaatatggaaccaaacaatagcagtagtaatagaaacttcaggctgggcgcaggggctcacacctgtaatcccagcactttgggaggccaggacaagaggatcacttgagcccagaagtttaaggctgctgtgaaccatgatcatgccactgcactccactacagcctgggcgacagagccttgtctctgaaaatttgaaaaaggaaagaaagaaagaaagaaacttcaatattatcagtagagtccaatgttgtgaaacccctcattaactaaatttccatactcttcagtaggtagaaaataattactttttgattcattagaaagcacttaatttttaagatggagatcatgtaattttgaactctaggtcttgcctactcctatataaattctcctctaaacaacagccaaaattgaggccctctttgagcttcaggctggtgccaaatggctctgcttattttccccaaaataaatcttccttccatgtatgatgagaccccctccagtataaagaagacccaaagaaaatcacccaaagaaaaaaggcccaaagataagacccaaagacctaaagatttaaatatatatacagatacagaaggtttgtttctgagtttctgtagtgaccttggcaataccttgtagttcaggacaatcctgaggaacacagaagtgctggcttccttgaggaatcagtgatcaggactctcgagccccttgaaccccagcatagggcgggagggggtgagggcagcaggggtgggtgtctgaattaatgtcaggtctacgtgatggtgtcatcaagtgttccagataaaaagttttattgagccgggcgcggtggctaatgcctgtaatcccagcaccttgggaggccaaggcgggtggattgcttgagcccaggagttcgagaccagcttggggcaacatggtgaaaccctatctctataaaaaaaaaaaaaaaaattagccaggtatggtggcgtgcacctgtggtcccagctactcaggaggctgaggcaggaggatggcttgagccaggaagcagagattgcagtgagctgagatggtgccattgcaccccagcctaggcaacagagtgagaccctgtctcaaaaaaaaaaaaaaaaaaagatttattgattccaaagaggcatggccacacacacttagaccagcaggtgctttgctaagccctgatggaggctgccagacccgccgtcaagaggagctaagggtagtgtacaatgagcccacttagtgtatgacggccgctgccgtgggtggagtccttgtgagtaaccagccagcttgagcaggatgcactaatttgctctgcaaacccagccattgagaaatacgcctcagatgtaccgaactctaggtcctaggagtatgttggttggggtaggttatcaataccagcccacttgcagtggatgagctggtggccatttgtagtgaggaaagggatgtgtcaacctccatcttagactccacaattgagggatgtgaccaccattcctccccagccagcccccaaaccacgtttgttgctgcctttccagatcattgccatgaaggatggcaccatccagagggagggtaccctcaaggacttccagaggtctgaatgccagctctttgagcactggaagaccctcatgaaccgacaggaccaagagctggagaaggtgggtatatccagggatggccaagcagccacccctggatgcaaaggttctgctagaacctgaactcataaaggtcttcctgtccttagtgccccaggaagccccctaaagggcagatgtgggagctgggcatgaactggctcctaccagaggagagacagtacctgtgccaggtgcccagggcagaatcaggtgggcaccttcgccttatcctgaggtagtcagatactatttagttgcaaagtttcagaaaatcaactcaaactggcaaagaaaactaagcaaagaaaacaagagggaattaaggatttattgacccatgaaaccaaaaagtccaggtgtgtcatagctttaagtgtgctggatccaggtagtcagtgtaatcagaaatctgtttctcccatctcttgactctgctcccctcaaattggctcagctcccctcaaattggctccattctcatggtatcagtgagggccaccagcagtcttaggtttacattctcccagctcaacaactctgccagaaaaaaagtgcctctttccccatagttcagcaaaagtcccagggctgagtctcactggtccagtttggtcatgtgcccacccctgaacaaatcactgtggccagcggtgtggaatgtgaggattggcctgtcctgggtcacgtgccactttgggagccagatccacctgaatcacagagactaaaaacaggggaagagtggttccccacagggatatgggggtgctattatctgatgaaggggaaggactaaatcctggcaagatgaatgtgtgtctgtctgcccctccctcaggcagggacaaagtagaaatctgacattggtcatcaccagagtagttaccccttaacttccccttcccccaccaaccatatatcctgaagacattgcccaggccacatctgtcttttaggagactgtcacagagagaaaagccacagagccaccccagggcctatctcgtgccatgtcctcgagggatggccttctgcaggatgaggaagaggaggaaggtacaggcaatgggactgggagtgaaattatggcctgaggtctgatcagccacagagaggctaaggtttggggttctgggtgtggtgcagtagtgtgcctttgattaaatggcttccctctgtgtgcccccgttgtcccctcagtaagtggggataaaatgccctgattcaccctcagagggatggaaatgtgtagccacagagtgggttcttgcggcctgcagaggaggcagctgagagcgaggaggatgacaacctgtcgtccatgctgcaccagcgtgctgagatcccatggcgagcctgcgccaagtacctgtcctccgccggcatcctgctcctgtcgttgctggtcttctcacagctgctcaagcacatggtcctggtggccatcgactactggctggccaagtggaccgacagcgccctgaccctgacccctgcagccaggaactgctccctcagccaggtgtgactggcggcccatggcagaggttgggagtggggatgggggaagggctgagcccatgggcaccctggaactccaaatcactctctgcctgtgaaggagtgcaccctcgaccagactgtctatgccatggtgttcacggtgctctgcagcctgggcattgtgctgtgcctcgtcacgtctgtcactgtggagtggacagggctgaaggtggccaagagactgcaccgcagcctgctaaaccggatcatcctagcccccatgaggtacccgtctcccctggccaggctgggactgtgagcaagtcactgttctctgagccttagtcttcccatctataaaatggggatatacaacctgtcacaagcttgtgggggtgactcaaggagacagtgtgtgtaaaagtgccctccttgtgcaagaagcagggagaaactggcatttactcagccagatactgtgataggcattgtgtgtggttagctcatttaattgttaccatggccctttaaagtgagcgtctgcacatccaagtaaagattgttttctcctccctaagtgggtgtaatttgcccatccccacccatgagttcagctccctgccctcccctcactctctctccctcagccagcctcaggttttgacactgggggaacaggtagctgttctattaataatttcctgtaatgggatggataaaaatctcaaaggccacttgatgtcaaagaggtttaaagttgtccctgcccaattggttggccaacttggcttaaaaacacaacaggcaaacagattttctggccccttgtcgaggctagacctcacaatctaactgcactttttactttccagcctcatgagttttctgtggcccacagatatggcctccaagtttatttacttttactctctatttgccccagctctgtagttctgaaactccctggttggggttgggctgactctgggtcagccagccggcaggctgtccccagggccctgttcctcttggcaggttgtccctctggagaggactctgtgtcccaggaggacagctgctgagtcaggccgagccggcagctgagaaaggcggcagtcgtcagatgggcttgagaaactgaaaggctaacgaaaggccagcgcccctttgggcagctgcaggaattcacggggatacaggccagatgtctacaaattggcagaggatgccagacccatgaatgactccagagacacttacatgaaataattaactatctcattcagtaaacaggaagtaaatcaatggacaaatgagtaactcttcctctggctgcctcttaggttttttgagaccacgccccttgggagcatcctgaacagattttcatctgactgtaacaccatcgaccaggtacagaggaccgtgccacactatccccccttccagagacacctcggacccctgggggcttctcctgtctgaggctgggttccccagatcaggtgatcacagccctctgggaagaagccagtgtccccgatccgattataatgctgcttcagggctggggcctccctcgtgggagcctcacagtaaggctgagggaaaccagatccctttagcttccacctgagatcccactggctttctctagtaaagttccagcatattctgaaccaaggtggctgattgtatggagaatattcattttgattcagcctgtgttctttatttaccattgtaccagatggtgtgaaaacaaaatcttgattcctacctcagggagtttaccttgtagctggagagatgagatacgtgcctataataaagggagagcaaggccgggctcagtggctcactcctgtaaccccagcactttgggaggcggaggcaggcggatcacttgaggccaggtgttcaagaccagcctgatggccaacatgatgaaaccccttctctattaaaaatacaaaaattagccaggtgtggtggcaggtgcctgtaatcccaactacttgggaagctgaggcaggagaatcatttgaacccaaggggcagaggctgccgtgaaccgagattacgctgctgcactcaagtctgggcaacagtgagactcagtctcaaaaaaataaaggatcaaaaaataaagtgagagcaaaacatggcggccagtagcactctaaacacagtcaataccaaaattcacctcactctctccccctcgtctccctcagcacatcccatccacgctggagtgcctgagccgctccaccctgctctgtgtctcagccctggccgtcatctcctatgtcacacctgtgttcctcgtggccctcttgcccctggccatcgtgtgctacttcatccagaagtacttccgggtggcgtccaggtgatggcctcaggggtgaggggtgggaggtgctttgcaatgtgcagtttggtgtacttgctagactcatcgttatgagagtaatagggtcgtgttccctccaaaaaataaaaacaaaaaacagaaatgaaggaaatagaaatatccacatcttattccaccgccctaatataatagtctgccaacacacgcacacactgaggttgacatctgaattatttccttgggcgatatggtcaggactggaattgctaggtcatgataaatgcacattttatgcccttcattcattttgccaacatgcttcccaggagggttgcatcattctagtggtcaggctgattgctgatgcatgaaatcggcgggcacctgattcaagcagtgttatgataacacctcccagcccacgtgagtccagagtgtagctgtaagccttgacttgagggagcctctcacagccattctcatggatcacatttgccctcatgagctttggatccatgcacgcctctttcctcctcaaaattttctaagaatgttctctagggagttctttctgggagtgattctcccagattcatagaaactcatagattcaaaaaattgtaggaaaaaatttaaagaacgtctaggccagtgtttctcaaactgccaattacagcccatcagtgggtcatgaaatcaatatcatggatcacaaccagcatttttttaaaaatgaaaaaaacatcagactgtattcatagagtaaagcaagctttgcttcatgaaacctttgtgttggtcatggaggtgtgtgagtactgatttgtgagataaaatatatttctgactgcaggttgtggtcagaaaggttaagtacctttcccaagtgcacatagttggctagaaactagagttgagatacttattagcaataataaaatttagatgcattttggacacaattacctgccccaaaggatcaacatttgtataaatggctttttgcttggatgatccagaatggcccgacacccacacgaacaacatagctttttgacactcaaaaaattcaaagtgctgcacaagctgttctacaaagttcatttcttctgccagagaaacagcccagtctctgtggcacccagtctgaccctggagatggtttatcagggaaatcaacttcctgcatcccaaactggcctccctggcactgatgtgcttgtcgaggtgcagctttggggagcaggaggcaattctgttgccatggaaacctctggccttaccccgagacgaaacctatcatttcagcacatcactggccagggtctaaagagctccttgatggggtaagcggaagacggggttgaacgctttgagtttggtcttctgttcctttggccagctgtctcaaggttcagattgttcacctgtaaaatggaactagcactgcctgcccagccttagctcagctccaggctgtgcagcagaagtacagggacagatggcgacctggggttgacaatgcccaggacagcagtaattgtgccccacatcaggctgtgtctaagcattgtacataaacgatctcattcagtgctcacaaaagctcaatgggctggtggcattgtcttcccccttcacggggtaagaagctgaggcctagagaggtaaggccattcacccacacagcggtagcaggtggagctaggcttcaggcccaggccgagccctgagcctgccctcttaactgttccactctgttccccgccacagggacctgcagcagctggatgacaccacccagcttccacttctctcacactttgccgaaaccgtagaaggactcaccaccatccgggccttcaggtacgagtccacattcccccaaggtaggagtggaacaggggtggggccagggggcacaggccatgagatttgattctcaggactccacttgggaaggccaaggacacgttctctctcaagctgcctcaggtcccaaggcccaagggatatccaccagcagggacaggccaggtgggctcccactgaatgttctagagaggaaaattccagctctgtagacaagcccaggacctctgtgaggcagagcatgaaaagagacaaagctgggacaagtcttcatgtatcaacgctagaaagggccttaggtgcgggccaccctaagcccttcttttattaaggagcccctgtgtgccaaacactatgctgagtactgtacaggccaatcccactcattctgcactgcaaccctcggtgctgagaatggtcatttccattgcacagacaaggaaactgaggcacagagacgttctataacctctctgtgtaaggtgccacaaagcccagacttgaacctatttgttcatgcaacaaacatttactaagccccgactatgtgctaagccccatgccaggcactaaaaagatgagtcaaataagccgctgccctgcaggcgtttacagcccagactttgagcaggccaggataaatccacgtgacaagtattctgaaaaaagcggattcaagggctgtgggagcatagaagagagacagtccgggaaggtttttgtaccagaggtgtcatcagaactaggactcaaaggaggggcaggagttcaccaggctgaggaattcctgaaaacttcagtgcccctgccatcgtctcactaccctgagtggtgatgttggggtggacaggagcatctgaggttgcctggggaatgagggaagctgttgtttcccactccccaagagtctgtctgatctccagaggcatctctcttccagtcaggcaggccagagacccctgacacacaaagttgggctcttttctcatcttcatccagagagtgataataggttatttttagggtggcacagctgcacgaagtatgacagtaaccatgagacaccaagcactgtgtccaggagtaaccatagggcacaaggaccagccaagggccagagaggcttacatctcctccccccaacccctgaagtccagcttcagccctggagaggtatccaggcccctctgcccaccctggagcacctagggccagtggaaatccacctcttagggatcttgtctaagtaaagaagagcagagcaaagctctgccctggccttggcgctgctccctggacatcccttgcccctggacaagcctatgctgtgtcttccacaaagaagcttgctggggactggattatgactctagagtctcctcccagcctcctcttctcaagcctgaacttctcccgttccttcaacttccaggtccctcgacattactgagcctagcctttgctctaagttttggtgatttccctctctcaattggtgtctcagagggccctggggtagagagatggtgactcttctagagtgggccacagccccttgtgtgcagatcccagcttcctgtaaacagcctcagatcaggccaaacctgtggtcagccagagccactgctacccagtgaggtcttccacaccctactgacacggtgaatgatttttaaatttgaatgaaaggctttttaatcaaccccatacacatttaatgcattggctttaatccagcagcctgttgagagctattagcacttattgattgcccacttactgtatgccaggcaccgtgctaagtgttgtatgtgcattattacatttaatcctcacaaggaccacataacataggtacgaatcgccacattctccagatgcagaagcgagacccagagaggctgggtaatcaatccaaggtcacacagactgcgggggctggcgctgagcttggaacccaggtttgcctgaccttctgggctttcctaagagatcttattttttcccaaaagagtttcaagagtgcccagcactgggctcagtggcgggctcggaggttgttttcgttcatgtaggaactatcacttccccatttttttcataagaaaactgagtctcagtcctgatacacagccaggaagttgtgatgttcaggctccaacctgggtttacatggctccgaggctggggctcttttctagtcctcagacacactgtcgcacgcctgtggcagaagctcccatctcacacttgccgaccctcaactcacacagtcctgagacccacatacgctgagcgcctcacactcctataacacgcacatgccctgatgcacacacattttcaacacgcacttactctacccttcaggcatggtttcacactcactgcagacacgtcaccctcccacacgtctccaccctgggggtgtgcagtagcatgctctctcccacctcagaacctcccttcagtcccctcagacacatgccctctctccacgcagagacaatcaaagctgaactaacaccttccagggtgaaaagcaaatgcccagtaaggtacgtcttgggtgcctccgtgtcccctgagtttggtcctatcaaaccagcgatgatgaggcagcttttctttcgttccttcctccatcatcaaacaagtgctcctgcatctcctctgggccgggcctacgtcagcaaggtctgagggaagcggccaaggagagtgatgacggcagcccaggttgatcagagaaaggaggcaggtccatgcgcagtaactcagggaaaacatgatgaggacctaaggatgagaaagaagcctccagagttccctgtgcagagagattccatcaatttcagagggtcaggggagtgccatgcattcatccaacaaatatttattgatagtgccaggtgctggggtatattggtgaataaaacatcttcatggaatttgcagtctattgagggagatgattataaatagctagagaaatgcatgtacagcagatactgtggagcaaacaggttgcagacaataataggggaaacctactttatagtaaggtagtagccaggaagagcctctctgaggaggcagcatttaaggcaagccctgaaggttgagttgagccagccttatgaagagcaagggcaaaagccttccaggaaaagggaatagtgtgtgcaaaggccctggggtagggaagactttagtattgtcacagagcttttaaaaagctgagtggctgcagcatagtgtgtggggtgtttgtggcaggaattaggttggcaggagggggttcttcatcctataagcagtggaaggtcattaatattcttttttatttgtttttttttttttttttttttttttttttgaggcagagtctcactttgtcacccaggctggagtgcagtgaggtgatcttggctcactgcaacctccacctcccgggttcaagcaattatcctggcttcctcagcctcccaagtagctgggattacaggtgtgcaccaccatgcccagctactaatttttgtattattagtagagacagaattccaccatgttggccaggctggtcttgaactcttgacctcaggtgatccgcccgcctcagcctcccaaagtgctgggattacaggggtgagtcaccgcatccggccggagatcattaatattctaaacagtgggggagaggacacagtttgcgatttagatagattaagccagccactgtgtggagcatggactgtagggagacagcaggtagacgtattcaggaagctgatgcagtagtccaggtgagagtttgtggtgggcaggaagcaggatagagggggagggaggcaaggactcttttagagagagacataagaggacttgccaaggggctgaatgtgaatccaggtgattcctgggtgagaaactgggtaaagggaggtgccccttattataatgggaaagacctagagaaaatggatcttggggtgaaaacaagagtttggaggaggtggggattctggacaggtttgaataagcagaaaggagtggggtggacattccagagagggatagcttacatgaagtggccacggtggcatgtctggggactggaggggccctggagcctccctctgcaggtagggagactcctaggagctatgtggaccaacactgttcccttaggagcttctcatcctccctccaggtatgaggcccggttccagcagaagcttctcgaatacacagactccaacaacattgcttccctcttcctcacagctgccaacagatggctggaagtccgaatggcaagtgctattcccctctaccctggcctctgataggagggtggggccagagcaagagcacacaggtacctggggatgaaagagaggataggataccagatcgtgtggacaccaagccttcctgcttcccccagccctggtggtcctcctagtgtctagcctgtgctccttttccccatatcactgcctggaggcttgtgtatctgaggtgtgtgccagtggcaagaacagttgtggtgaatgtgtatctgcagtgggtcatatgacacccacattgtgtgtgtttgtgggccagctgaggcgtgcatgttaaagggtgtgcaggggctagggggtaggggagcatgagcttgtgggacatgttggctcctggggctccagccttcgcagcccttgtgtgtgtctggtgacgtgtgcatgagttgcagggctggagtggaggcctggctgagctgctctctgccccgaaaaggagtgaggtagaacaggggcctgtggctctaacccctgagcgcccaggtcagctcctctccctccccaggagtacatcggtgcatgtgtggtgctcatcgcagcggtgacctccatctccaactccctgcacagggagctctctgctggcctggtgggcctgggccttacctacgccctaatggtgagcggcagtgggctagggcagaggaggggtcagacaccagcactcccggagcaccttcgtcactggagacatgagacactcccaggccttaccccaatttcatttgcatctgatgccagagggacagtgcgggcaggaaggctgaccagcaggccccagggcccaggccccagacaggtggaggttggggagccacatgactgaccctccctgtgcctccagggagggctgctctgagcaggcagtggatggcagcaaaaggaatctggggccctggcccctctccagccttaagaagagccattctggtggctgaggacagaactaagcgaccatggagtgtgcgccactggcttgctccccacaggtctccaactacctcaactggatggtgaggaacctggcagacatggagctccagctgggggctgtgaagcgcatccatgggctcctgaaaaccgaggcagagagctacgaggggctcctgggtgagaggctcagggagaggggtggggaagagtccaaggaggagtgtgtctgggttgggggccacaagggagcctggggatggggtggcactttcggatactagctgtggcccatgcctggtggctgagcccagcccggcccccagcaccatcgctgatcccaaagaactggccagaccaagggaagatccagatccagaacctgagcgtgcgctacgacagctccctgaagccggtgctgaagcacgtcaatgccctcatcgcccctggacagaaggtcagagcacgggcccaacccaatgctgcaggacaggcgtgagcaggggatggggcatgcacggagctggatggcttcgcagtcacctcgtggccctccagggccgaggcctctcactattcagacatcgcagtctcctgccctgggcctgtgggggcccatctttcctctccttctattgccttcccccagtgctgccctcaggccttgtcttctcactcatccaccaaggagaccgacactctggactcccccagctcacacgggctttgtcagggcctccctctctgcgaatggtcaggggctttccctagggcactgccccgagcttcagggcagggacctgggggcagacagcgaggccacccttgtattgagggtgagcccctgcctatggccctggcccagctctcctctcgtttcccactctgtctctttgtctctgtctcactttgctgtggctgtccatgtcattctctgaccttgggatgtacctctgtccctgcctctctcatccttctatgtcactatctgtctccgtattgtaatttctgttggtacccaagtgccaggaagcaacgggatcagaggtggctccattgtagggcggggcacacagacacatccatgcataccactctcagctgcccctgtgtcctcctgccacacccatgcccatagagacacaccactgccccccagctctccttcagccaagtacccggcacacccagacccacaccaaggcccaggcaaatggacatccatgcctgcacttgcgtgccggtccctgtgtaagccctctctggacccactgcaggaaacaagcccaaacctgtggtgtccaaagagaaactagtcagaaaaccaggccaaaaagataccctgtgacctcccacacctgcacacacacccagagctagcatagaggctattcccagcagccccagagtcccagtggcggtgcctgcttctctctttccagatcgggatctgcggccgcaccggcagtgggaagtcctccttctctcttgccttcttccgcatggtggacacgttcgaaggtgagttgtaaggcgggcaccccacgtgtacccacagccaccagatgaggcctcagccctggcacgtggtcagacatgacaggaggcccagcagtcaccgccttcccctgcaccctcactgggacccatgcagggcacatcatcattgatggcattgacatcgccaaactgccgctgcacaccctgcgctcacgcctctccatcatcctgcaggaccccgtcctcttcagcggcaccatccggtgagccccaccacccctcaggcccacccagccccaggccggctcagttccatcagatctggagcacaaagaggagggggttgggggagaccaggatcccagaggtgtttcctgctcatgcccttctccatcccatcaggcccaggcagcctctggaaggggatcccccacccatgggtctaagatgctgtcccccacccactgccaccacctcggtgcttctcccagccagacctccaactcagtctgctctcgctcactgccctctttgccgcctggggatgcaggcaggaccctgctccctccctactggggctttctgtgccacttccagatttaacctggaccctgagaggaagtgctcagatagcacactgtgggaggccctggaaatcgcccagctgaagctggtggtgaaggcactgccaggaggcctcggtaactactcctggctatgcagctgggttggttgggcactcaaggaccctgtaaggatggcagacagaagcccgtgtctcaggtttgccccaagtttggagtctgaagcctggcaggaccatttagtcctacttctcactatacgggggcccagagaggtcaggtgtcttgccccaggtcacacaactggtcagttcagggtctggctcctcctgcagggtacagcgggtacagtcagggatccttgtgagacagagattgcgagtcccccatgccaagggggcatcttcagccctgccctgccccatccacctgcatgcccagttctgccttaggggaggagaagatggactgggcaatcatagacacgggtcactcatcaaggccaccggtgattggcaaagccttggtatatttgctgcagctcctggagcattgggggtggccaagccttggtttcaatgaatcaccctaccaaggccctacatacacactcagtgcacccctcagtgcacacgccccctcccagaactgcccagggccacagcagcacacacctccaggggtgcccttctcgttgcagtccttgcagacggcctccacattgttgtgtcaggtgcaccagccctgcacacgcctgtgctcttggacacacacccacctatttgcccccatgcacacattttccaacagccccccaagccatcccatctgctccactcacagcacaagattaactcagtcctacttcatctccccgggctgttttcagatgccatcatcacagaaggcggggagaatttcagccagggacagaggcagctgttctgcctggcccgggccttcgtgaggaagaccagcatcttcatcatggacgaggccacggcttccattgacatggccacggttggtcctgggcccctccatgggaccatggtcttggaaagggtttagtgggatgctagggagaaatttgcacgaagtagtcctgaggctcaagttgcctctaacatcaaatgctatgtgttgcagaaaatgaaaagagctggggggaccctgactctgtctagtcttagggaatgttacacacacacacgcacacacaaaaacactatgcaaacacacacataagctgcacacacagacccacacagacttcacactgtcacctatcacaacagcacacacacagccacaaccacaacctacatacacacacagagctgagctcccaacaggctgagtccagtccctgagtgccgggaacctgttcagtcctgtggggtgggggtgggactaggatcggggtcagatgggagctgagccacagacctgggctccacatcccccaagccaggccagaccccatccactgggcaggtgagccaacagctgttgcccccacttggcaggaaaacatcctccaaaaggtggtgatgacagccttcgcagaccgcactgtggtcaccatcgcggtaaggggcccattgatggggtgcagagggacacccagggacaggactggcctgttgtggccgtcatcagtgcacagcccctgggcttgcctggtcccagtaatcaagaaagaaccctgaagcaggcagttcagggcaaggggcctggagggcatgcagggagcctgggttgcaggatttggggtggggggttttgcccctgtgcttccctcagacctcccctctccttctccaggttccaaggcctgcccctgtcccaaggccttatatgttaggctggcgttacttctccataggaagtgggggaggggttgtggagggtctctgagccttgaagcctggaggtggggtagagttgggacttggagaggagagaagggtggtattagcagatggagagcttgtagtcacatccaccccaggaaagtgcagtccccacagtgacaggacattctggccacatgcctcatcctcctcctccaagccgcaggagggccaccctcagctgtggcccccaccgcgggtggtattcccaccatcctgacccgccccctcctgccctgcccagcatcgagtgcacaccatcctgagtgcagacctggtgatcgtcctgaagcggggtgccatccttgagttcgataagccagagaagctgctcagccggaaggacagcgtcttcgcctccttcgtccgtgcagacaagtgacctgccagagcccaagtgccatcccacattcggaccctgcccatacccctgcctgggttttctaactgtaaatcacttgtaaataaatagatttgattatttcctactagaggccctaagtctggtgggcaggggctggcggtggatggtgggttcagtagaaccagcctggctctgacatcaggcagaagctgtgtgagcaaaagcctgcttccttacctgtgaaatgaggcctctattagtcagccaggctgccacaacaacatatcacagactgggtggctttaaaacagacttttttctcacagttctggaggctgaagtctgggatcaaggtgttggcaggtttggtttctcctgaggcctctctccttggcttgcagagggctgccttctggctgtgtgctcacatgacctttactctgtgcacatgcatccctgctttctctctgtgtcttaaaaggacaccagtcatattggattagggccccac

SEQ ID NO: 15316 - DNA, 34985 bp, Homo sapiens
gaccccagatggaatccccacactgtccaacatcaccattcgtatcccccgaggtatggcccagtccacccctccagcatgcccctccccatgtcccactgaataacatagagataaaaagacaaagctgcatttattgagcacctactctctgctcattcttggtgtatgccctgggtatattatagaaggggaaggctacattctagaggcttccgtgtgctgggtgggagtgaagcactaaggacagggtaaaattgccagccttaatgtcaaaccatccattgcagacagtataggtaatgcacaaaaagatcagaagtgggtagccaaggaacgcaagtggaagtgatggggtttctgagaatggacaaaggccctgaggccatgaggcaggaggattttctggcagaggcagccatgagcaaagtatggaggtgggttggaggtgggacccaggatggtgtttcttgggaccacaaggagcctgggctcatactaggagcatgggaaaggagaagcgagtgcttaggaagggtggcggggcaggaaatcagagagggggaaggacctggggagccagaggaggatgttgatttccagaaggaaaggattaaagagggagaggacttgctggggattctaggtaggaagaaagaaaacaggggccccagggttgggtgcatctgtctgtctgtctttctgggtaatggttgttcagactcccccggccccactcacatctgccaccctccctccctgcaggccagctgactatgatcgtggggcaggtgggctgcggcaagtcctcgctccttctagccgcactgggggagatgcagaaggtctcaggggctgtcttctggagcaggtaatacatgtatcctcagggcccagtggaggggaaatctccttttaaccatcctcctcagttgaggatgcacacacatttattggagggcccactctgtgttcagtgaggactcaataaatgctgctaatggatattctcatcatcatcactagtacgtattcacctcttactatgcgcaggttctttgctaagtcctttgcatgcattatttcatttaatttttatgataactaacaaggtccatactgttctcaattctcatttatagaggaaggttaaactatttgtcctaattcacacagctaataagtggcagagctggaattgaaactcagttctgtcagactctgaatcccatggttactcagatgcacggcagtaatttcccagtgtgggaaattgcaacaccaacattggtttccagcttggtcctgagctgcactgacctacacaccataagtgggtgttctgaagatccagatgtaaccaataaatgttggtttctgggcaaagatcactgtcttaattaaagagccagaaccccaggctcagtcaatcacgaatctgttatttatacccacctacttccaagaagcacttgaaactagttgatgaaagattcatgtaaaaatcaaaaccacaatgagataccatctcacacccgttagaatggtgatcgttaaaaagtcaggaaacaacaaatgctggagaggatgtggagaaataggaacgcttttacactgttggtgggagtgtaaattagttcaaccattgtggaagacagtgcggtgattcctcaaggatctagaaccagaaataccatttgacccagcaattccattactgggtatatacccaaaggattataaatcattctactataaagacacatgcagacgtatgtttattgcagcactattcacaatagcaaagacttggaaacaacccaaatgcccatcaatgatagactggataaagaaaatgtggcacatatacaccatggaatactatgcagacataaaaaaggttgagttcgtgtcctttgcagggacatggatgaagctggaaactatcattctcagcaaactcacacaggaacagaaaagcaaataccacatgttctcactcataagtgggagttgaacaatgagaacacatggacacagggaggggaacatcacacactggggcctgtctgggggtggggggcaaggggagggatagcattaggagaaatacttaatgtagatgaagggttgatgggtgcagcaaaccaccatggcatgtgtatacctatgtaacaaacctgcacgttctgcacgtatatcccagaacttgaagtataataaaaaaagatgcatgtaaaataaaaccctttaaaaaggtaagaaaataggaactgagaaatgaagagggtaaaaagatgttcagcaacctgggcagaggacaactacagccatcaacataaaacctggctctgtgccctctggtagccaagggaaaaagggatctctgggctttggagtattcatttaggaataaaagttgcagccaatcagcagaagggcaagctttccctaccaatcatttctaggggaaaattattgaaggtgtcaggtttttcataagcatgagtacagaactgagcagggagaaagactttgggcccaatgtctgaatatcaacatgcacccccgtttcctgcatttccaagatgtccctgaatggtgtatccaaaagatggcaaatttccctcctcagtggggtcgtgggctagcagatgagccccttgggtttcccatcacctcccatcagggactgtgatgtctttgggggcagaggggtctttgcctccattcgccattttatttgggagatttttcaacatagcctgactgggaaggcccaggtattcggtttgagatcatattgccttattccgactgcctctccagcctttggagggaggagcccttttctgctgtccaactgcatgcctgcagcaagaagacaagagtccccagtgcactgtgagctgaagaaagtaaccaatatttattgggtacctcctatgggccatgccctttgctaagtgcattgtcaacatgatctcatcaagcctcctactaagtttaggaggggagtgttgttaccccatttcacagaagcagaaactcaggctcagagaagttgggtgacttactagtcagtgtgtggagcagagactctgcccatgttctttccctcaaacctggtcactgctggggcccccagggcctagtcctaagggttattgtccaagccccatgtagtggtcaggctggatctgggctctcctccaaggcagggcttttccagaaggattgcagggctcagacactggagctgcccctgccttgacctgctcagcatggatgtcaaaacccactctgaacctggtccctttgccctgctttcttctcctcccccaccctcatgccctcatgtggcatcgtgcctgcctcaggagctctccttgtcctatgtagatgaagcaggcatgattggcaggggtctgctctgccctgcctcagtccccacctcttctccaagctgtgccaaccctccgggtctgactgctgcccctctctcttaggaaacctctgccccagcccagggaacacaaggagcctctccaaggcagaggaccctaagcacttcttttttttattattttttattttattttaggttctgagatacatgtgcagagtgtgcaggtttgttacatagctatacatgtgccatggtgctttgctgcacctatcaacctgtcatctttttaagccccacatgtattaggtatttgtcctaatgctctccctcctcttgcctcccaccccccgacaggctcggtatgtgatgttcccctccctgtgtccacgtgttctcattgttcaactcccacttatagtgagcacatgtggtggttggttttctgttcctgcctaagcacttattataggccaggcactgtgcaggcacctcatcatctcagtcagtctgcaccgaactctgtgcagtagatattattatatcctcatttatcagattaggaaactgaggtgaagcaagttgtccaaggccacccagctgttaaatggcagaagtgggatttgcacctaggtgctcaagtgcattggtttgccaccatgtgctcaaagagaaggggcacaagagcctcatgaagaaggcatagctagcctgacagtccaaaggccagcagccgctgtggccatgactcacacacacctgcctcctcccagaactgccacgtgggtcctcacagctctgtccttatcaacacttactctcctttacaggtagcctaggccccagctcccagctctgttcgaggctcgcagaggggcggtagtgaaggggtctcatttctccaggatcctctttgctctctcgcccggtcctggtccagcttccctttcaagcatagtgaagtgcatttgttagcttgcagccaaccctgggaaatcatgagaatttgttcccaagtcaactcattctccagcgtccacagtgacgtattcactcacccagttgagcgcctagtgtatactagaccctgtgacagcaacaggagtgcaaaggtgactaagacgtggcccctgctttttttttttttttttttttttgagacggagtctcgccctgttgcccaggctggagtgcagtggtgcgatctcagctcctcacaagctctgcctcctaggttcaagcgattctcctgcttcagcctcccaagtagctgggactacaggtgtacaccaccatgccggctaattttttgtatttttagtagagacggggtttcactatgttggccagggtaatctcgaactcctgacctcatgatccgcccgcctcagcctcccaaagtgctgggattacaggcatgagccaccacccctggccggccccgcttttaagagaggggagagaagacctgggccttagaagagctcagaggaaccacaattgactctgcagtcaaggagaggaggctcactgcggatgtggtatttgagccttgaaggatgagtgtggtttcatcaagtagaaaaggcagggatgggaaagggaggtggtccaggcaggggtgatggtgtgggcaaagccttgctgatattaaagaacatagttctgtgcacctggaacactggatgcatggggtgcattatgaaagatgggactgaagaagtgaacttggcttagatcccatgtagtaggtctgagaagtaagatttaacccaaaggttgcaaaagaaccatgcttgtgataaaggatgatggattggggaaacagagaaaaagacagacagactgtaggaagggaggtattagcaaataatcataacacagtgtgaggtgtgcattaatattcactcattccaagtattgatcaagaagagaggtaggtactgggttaggaaacagcttgggcaaatgcatggggaaatgagagatgtcaagatgcattctaatggcagcctcttgaagatcttaagttgtttttggttcactcatttcgcaaatgaattcatttagcaaaagcactatggatacagtgcttacctctaggaagtaagttttagcccaaatgctgcagaaggatcatgcttatgacaaaggatgatggactggggagagagaaaaagaaaagacagacagactccaggaaggaaggtcagtctgcagctccttatagtggctaggagaaggagtctaggcagatacgactcaattagcttcatctgctgtttgtctctcaaaatctagacatgtgcactgctctggctggcccacctatcctgggcattgagttaagtgtgggggctgtgtgttgagagtccccctccattactggcaggaactccacacctcagacattgagccccaggtctgcagggagaagacgtgcttgcaaagtgagctaaaagcaaaacagcctctgacctggcaagcattcccaagtctgcacgcctgcagccagaggagagggtgatgccaggctgctgctcagatgcttttcagccatacccaggccaagacctggtgaccaggcagccagaaggagttccaggaggcacaaggcaggaagttgggggattaggaggtgtagaatggagaatgctctggggagatgggtgctttgttggtgcaactattcgtttattcctccagtgaccacgtgagcagtatggctgcacacacaggctctgcagccaagctgcctgggttcacatttggtctctgtgctttggaaaatttcataagctttctctaccagtttcccttattacccatgagattgatgtgaggattaacctagcatgtagtaaatatcctataaatattattattcaatagtgtacttctttgccaggaacaaaattcacctgttcctctttaaatgtcctccagtctgtctcctgggaaagattcttgtgagctccctggggacagggaccatattttgtttgtctcactgtatccgtagtgctttttgctaaacgaattcacttgctaaatgaatgaaccaggaacaacttaagaccttcaagaggctgccattataatgcatcttgacatctctctcctttccacatgcctttgtccgagctgtttcctaacccagtatttcactacccctcttctccatcaatatttggaatgagcaaataccgttagtgcatacctcacatggtattataattatttgctaatgcgtctgtctcctccatgactctgagctccttgagggattattccatgttgtaccccaggtgccccatgcagatgtgtattttgtgcactgttctgtgtaggctacaaaggaaaaggcctagcacctgcccttggggagctcacccacccaggatggacagaggtgtgcagacagagctgcagggtgggcacaaagggtccatctgctgaagtcctgcagatgcagccccgagcttgtccctcacgtcagcagcctggctcctggtctcagagagaactgtgtggttcccaagcattcactttaggaagaatcacttgcccctccctggctctctgcttcaaggaactgtgacaaccttgggatttgcaaactctctctttaatccttaagaggaaaatgttttggtaaaaagtcaagattagcagatacactcgggtgaaattctttccctggaaataaagaatagagccattaatatccacagtagagtgactttaaatgcccccggggggtcagcaggaaccagggccctgaggaaaggatcagcgtggggaagaggctcccacttccctgtgaggagctgcacatgcagtctcactggagctccctgctgcaatgctgttgcctgtggtggttggtgtggatgctgcctgccaagagccctgattccccaggaagagagaaaaaggcttctctcaggacggccctggtcgcatctgcctgtacaattcctggagcctttggggagctgaagtcaggggctcaagtgcccctgggtttcctggaggaggcaggtgtggtgagacagctgacagacaggagaagggatgctctgaggaagtgactgtccagccatgggaaccagatggcccctggctgtagtcctgatgctgccacttgctagctctgtgaccttgagcaggttacttcacctctctgagacagactcactgtctggacaatgagtaaaaccctacctttcctgtctcagagatttggcaatgggacccaatgacatcaattggaaaggatgctgtgggtgaaaggtaacctttcaggacagcgacaagcctgtctgggcaggatgaatgggctgtggagccctgtatatcctagctcactctttgaacctcagtttccacttcttccctttttatttattgccggggtcttaaatgagtgttgggggtatctgattctccctctgcctgtacttttggggccaagcactgagctgaaaagacaattcctcctagttctccaagcctacaacctgccccctaaccagctgtgagctgtaatacattctccagtgtcactgtgaggtttgtgccttcacccccattttatagatcaggaaacagaggctcctccaagtaaaggagcttgcctcagatttcacagccaatgagtggaaaagcctctgggattcaaatgtcagagcccatatttttcctacttctcgcacctgttatcatatgctgcctcttcctttaacctgcagttccctcccttcacctccaccgtctcaatccttcccactctttaaggttcagttcagctatgacttcttctatgaggctctactcattttctcagatttcttcctcctccaaatttcttgtaaaaattatgttttttctctgattctaaaagaatgcacattacattagaaaagatacacaagcatacagaagataaaaaccacctaatatcccatcacccagaagcttccagtttttctttatgcatttgcatatgcatttgtgtttacttttccccaaaagttctccgatactttgtcctacttttcttttgacccttataacttcctgacttcggtacctttctgatttgccctaccagagtgtgagcccctggaaggcagcctctgcaccctgattcaggttgccacacatatgccagctcctagtgggctggagggaaggacatgcggttggggaactggaagactcatgctttcagctgtgtgcttcctccctagagtgcaggcagaggaggaatcgaatcccctcagcactcttgtaaagaccacagcaatgagtgagagatggtgcctgccagacataccattctttacttttcagcttaaaacagatacaaagtttggggaggctcactggaggaggcttggggctacactggaaagagaagaacttggattcacaccccagcttcccctcttcccagctctgtcacatttgcaaactctgagtctcagtatcctcatgtgtaaaatggggatagggtttatagggttgtaaggatgagatgatgagttgtttgcaaacaacttctcacagtgcacagtgaaggtcagcaatgagagccagccccgccctttcttctttccaaatgattaatatatctgttaccagcctccattcattatatagctctgtcatgtgctaagcaccatgggggctgaaaaagatgttcttcctgccttaaaattccactggggatgaacaaattacacgggagctgatcagagaggaaggcagtccattatgagggctaattgagcagtgcagaccatgttgcaaactgagttagggcctggagagcttactgtgtgctggggtcctcaggaatgccacagatgcatcaataaccacctctgctactctggaagtagtcacatcaggaagactccagagataagcttatctgggctgtggccacagagctggaatttgtaagctttaggtttctatgtctcatgttaccagcttgtctataaattgtaaattacagccatctgatggttagggaatatgaagtttggttaagagaatgaaatgagaccacgaagattagagaacaggaaaagaggggactggggactacatacccatcagaatcttcattcagtcctgaccctcagcaggagggggatttcatcaggctcatttccatccttgatttcgtccatcctggttctcctgacaaggggcatttatcagagttatggcatgggaaatcacaggggagtaatgtaccatggcatttaagagtatgaacgttggagtcggagctattttctccgctacttactagctgtgtgactttgggcaagttacttagcctttctctgagcctcactttctttatctgtaaagtgagggcgatcagaataaacctccttcatatggttattttgagctttataaagagacaatactggctgagcacggtggctcactgccagtaatcccagcactttaggaggccaaagctggaggatcgcttgagcccaggagttggagaccagcctgggcaacatagggaatgagactcctgtctctacaaaaaatatacaaaaattagtcaggcatggtggtacgtgcctgtaatcccatctactcaggaggctaaggcaggaggatcgcttgagcccaggaggtggaggttgcagtgagccaagatcacgccattgtactccagcctgggcaacaggagtgaaaccctgtctgagagagagagagagagagaaaatactactatggtgcttataaaagttcaataaattttagctgttgttagtattattaaagtaagatctgtatgaaaataaagcagattttttcccccaaatgttcatgtcagaagtatatatttcattggcaaggggctgcttctggaaggttgagaggtatcctgggggaggggatagagcactggcaaaattggcatcacaattcaagtcacctcactcagtgttttttaagttatcaaaatccacagtatgaaaagcatttgacattacagtccactatatttatgcatttataaacaagagaaaaaatcacgaaaaatacagtaccacgtgcagtacacactgattccatctattctttttttttctttttcctcaaatgcacttgccgcctacttattccagacccaatgattgggtccctatccacagtttggaaaacactataagaaatgattgtgtcctctcactttccctctctgggatttagttttccaactataaaatgctcctgatgcccagccagcctcaccgctgctccgagtcaatgccaggaacgctgatttagcacatgctatttggagggtacccatccaggtgctgtgggagggacagagattgagaagagtgctttctgaccccacagaggccatttggaaaccctgggaatgggtgggagggttggaggtggggattgcttctcccctaagactcagcgtgatggaaaggcaatggggtgggaactaactggtgttggtctgtcccatttgtgtcccagcagccttcctgacagcgagataggagaggaccccaggtacagccttgggactgggtcagaagtgggtctcaacaaagggaaggggtagggtgggggtggaggacttgtgggtgggtaatgctgagtatggattcagggatgtgcagcctacatattttcagagacatggggctaaggcctgcattctcaatgagggcaaaatttggttcttggggacagaaaacacttagacattgcaatgctttgtggctgtccaaagtaccaaacagatgccagtatatctgtggtgctgaaatttcatggtgaatggagtcagaaaatagactagcgattgccagggtctggtgggagagagagggaagggactgccaatgtgtatgggatttgttttggggaagataaaaatgttttggaattagatagtggagatagttgcacaacctggtgaacgtacttttagtttcagaggttttctaaacctctgatttttttttaagtgacaggaaagacagaaaaaagtatatctaaaaaggctctaggggtgatcatggaaaagaaagttaagaaatatgactgtaaggaaaggagatgggtgtccctcaggccaggcagaaaattcagtcttgttgctttatgttcatgtgcaaatctaaaaaatccaagtgatatagattaatgaggctctgagtccctcaaaaccttccctccccttacctctccaaaaaacacttgagataccctagaggtggtatgaagtcaggatgggaaggttggctcagctttgcaaataagtttaagcctctggcctttgctctccaacaccaaagaggcttcactttggtatattttctctgccctttctccctccttgtccccaactgtcagtatgtgatgacaggctcagcctctgtaatggtagtgatcatatttcttgagccaaaaatcagacctcatggcatgtgacaagtttgcatatgtggatgagaacagagtggcagaatatttgacacgggagcagcttgggcagtccagggcacatggcactgcacctgacatccctggcagatcccccacattccgtggttgtcttctgatggggccatatggggctgcagatcatgcctggagccctcgcagctccagggctgcgggttcccagccccagagtgcaggtgctggtgtcagcctgcctggcctggcctggctctgtccagagcactccttgccccagctgtttgtgcagctgtatcagcctcagacctcagcctattcattccaacctgaatgcagaggctgggtctggaggagccacattgcgggcttcatactcctgatctgacaagttttccccccagagcctgcaccaatggcacctctccccattctccctcttaactgggtcctccagggccctcctcacacacccacgtggtcaggcagcagaggcttccccaagatgggcacaccccactctccacacctctctatgcagcatttgtggctacagactgggtccaggggattgtaaaggcatgctcatgttgggttggagggagctcaggatcttcctggaggatatggttcactcccatgagagctcagtatgcctttcctcccctgctgcagcccagagcgggagacagcgaccgacttggatatcaggtactgcgtcctgggaacattgccccccagggtcaactccctccagggtgctctcaggcccaagggagccacatcaccctgctgggcagcccccagaccccagccccagtgttgggggaggccagggagggcccctgtgctccaccaggtggctcgggagctgctgctgtttctgtgcatccatttactcccttcacataagatcatttttatctgggatctctttttcttttttcttcaaaaaccacatcactcaaaatgtggcttccttggctctgcttttaaaaaaaaaaaaaaaagttcttccatttggagaattacctgctgacttcaaagtccagtggcttgagggctacccaaagagggaggaagccagaagttgagtgttcccttggtttggtcacacttttgggctcctccctgactaaggaacaacagactgcagggctggggcaggctgggtgtagggcagggaggggatgaggtcctgctgccccagtcagttgagacccagacctctcaaacctgcctgggggaaggcaaggccaccagaggccacactaagcagatttctaccaactgcacctccccatccccttgcctccatctgagccatcagcttgacaactgcctctgagaacaagcccctgagaatgccttccgcaccccctactcccgccctgctttttccaggaagagaggccccgtggcctatgcttcgcagaaaccatggctgctaaatgccactgtggaggagaacatcatctttgagagtcccttcaacaaacaacggtaaaagcctgtcggagggaggcaggatgtggaggggaggaactgtctctggccagcctgccccagttccgggcccctccatcgatcacccacacccagccatctcactccccaggtgcttacctgcactccagcctctccatatggtgcacctggagaggggccaggtgtgcctgagcattggggcaatccagctcccataggggagagggcaggaatggagggaagggagagagccccgctgccttttctctagctggtgggagggctagctagctctctctgtgagtctccattcgcctggctcctgcactattttccctccaatgataatagttagggctagcatcgactgcgctcttactacataccaggcacagtgccgagctctttgtacacggaatttcctctcatgcttacaacaacctcagtaggtagatattattgttattcccactctacagatgaagaaccaagtttcagaaaggtcccaaggccacccagccagtaagtgaccaagatgggtctcaaatccaaagctgcctaacacctaagtacatgtttgtcaccaacatactctgatgcctccatgaactctggctggcacctgcccaggctaagggctggctggggaagtatgagaggaacaggctgggcaaatatttgaccagccatcatcattactgcctaaaccaaccagcagtggttttccctgcagtgccccaagcacgggttccggctgcagcttttcccactgcacagagatcatgagcgccctttcatcacttactctgcatatttgttcccaaccaattccatccttctagtatttaacctgcccaaacgctgtgtgaagtgctgacctcagctcttttcaagctcacacggtgtttgcttgcacccaagcgggaggcctattaaagccattgctcaccctgggcatagctacccagagactaatgaccctctgcaagtgctcgggccaactctgaccaggctgaccagctgcatcccctgcctctacccacgccaggtacaagatggtcattgaagcctgctctctgcagccagacatcgacatcctgccccatggagaccagacccagattggggaacgggttagtagcagcctctgaggggttttttcaaagccaggacccccaacctaccatgccctgagacactactcaggacaatgggtaactaggaaataggagacattgaaggctgaagagttgcctgcagtaaggtcaaacatgttgttcttgatgatgtcctttgacaggttttcagtcctgcttggagggcaaggtcagcttagtgccctcccaggctggggatcttcttcatttgcaccccaggtatacactgagagcccacacagcactgtgctcagcctggggttgtattgttcctgttcatcctccagatggggtcccctccacaagcttagacgaacaggattctcctgtgactgtcctccttttgtgtgattttaatccctgctgcctctgtctttgtttgtactggtcagatggtccctagcgcctacacaatgaatctttaaagacttggggctcatgctgccctcttctgaatgaattcagtaaacacgtgcaagttccttctctatgcaaggtgagaagcaggcaaagaagtggatagagccaggcctccatcccaaagagctcatagtccagtagggtacaggacagtgtctcctgaatggctgagggcatgatgtgttcctcctctttggtgacagggcatcaacctgtctggtggtcaacgccagcgaatcagtgtggcccgagccctctaccagcacgccaacgttgtcttcttggtgagtgcaagttcccttggggtcctggtctctggctgcctcccaggcctaactgcccacctccacctccccgcaaccccaccatcatccaacaatctccctctccaggagtaaatccctcctgccagagatattgccttatcatcctagtgatagggaaactgaggcaggcaaggatagcacaaatgacccattgcagacttcagatggagctctgcagtagccaatgaggagaggcaagctgtagttataggctgcctgtctgtgggacagcccaacccctcaacacttatgcagcccgactataagaatggctgataacagaatgtgtgctgccacttcccatcttatgcccagtgcagacattgctaattgttcacagcattatttcccatggaacttaactcatcctcagaatccttctcaacacagcactccaggtaaccactagccatcaaacatgagataaaactaggccaggcgcggtggctcacgcctgttattccagcactttgggaggccgaggcaggcggatcacgaggtcgggagatcgagaccatcctggccaacacggtgaaaccccgtctctactaaaaatacaaaaaattagctgggtgcggtggcgggcgcctgtagtcccagctactccggaggctgaggcaggagaatggcgtgaacccgggaggcggagcttgcagcgagccgagatcgcaccactgcactccagcctggggacaaaccgagactttgtctcaaaaaaaaaaaaaaaaaaaagaacgtattcgcaatccttacactacttcatgtcaagttctgttgtgtcaggtgccttgactgacactgaagaattctaagaaccagtccttggcctcaaagatttagaatctgattagggagacagagctcacccagttcaagaggcccagcccggttcaaatccaaactgtgcggcataaactatgagggggccttgtccagggagacaactgtgagggctggagtaatcagggagggcttcctggaggagagcctcaaagggagagtcaattaaacagaaggaaagagggaggccatttgcacagtgagttggaagaaggaagctcaagtctctgattccagctttattccctcccctctccctacaccacacgcacaagcactcctttactaaagacacttcacagtgggaagattcagtctccgttaccgtctgacacacacacagcgttttacaaagcatgggtgcattcgcgatctctcatgagatttaaacaaccctgctagagaaaagtgaagtggacattttatttcagtaaacgtttatgaagcgtctactctgtgccaggcactaaacgtttatgaagcgtctactctgtgccaggcacaggcacaagaagtctcagttcttgggagtgccataatcaggaatggacaaacaatgatcagatctggctttgcgccagtgtcacgggaatagggaggaaggaagggtaggcgtgggggtcaggacaggatgcaggaggaactggtgcttaggtgagcgaaggatgggtgggagttcacaaggcagacaaaaggcagagcagcactccaggcagaggaacagctcaggagaaggcccagacggcaggcttcctgggaacctggaatgcagagtgctgggaaagcacagatgaagcatgagtctagaagggaaagcgagaggttataaagcacctggaacaccagcccacagggtttgactttagagatgatggggagccgttgaaggtccaggagtcaggcagtgaagtgattagatctgtttgagagtgatatctgacaactgccccattttaaatgaggtaaccaaggcccagagaggttgggtgagttgtccaaagccacacagctaactagcttcagtccctagagcagagttgatagaactctaatgggttttatactcattgtcacccctccccaccatgcctttccctaccctctactctcttcctctcccttctgcccaggatgaccccttctcagctctggatatccatctgagtgaccacttaatgcaggccggcatccttgagctgctccgggacgacaagaggacagtggtcttagtgacccacaagctacagtacctgccccatgcagactgggtgagggggaacaagggggtcaggctatagggggcagggctggggaggctgtcaggcatcttggcaggaaccaatccgttgtcttggtagcaactgctgagggccacaaagcataagagaccagcactggatggctttatgcatgctgggcatttcagggagaccctgtacaggccaggggtttggtatcacctagacccacagacactccccatcctggcccgggccccccatggtacactcaaggctggcaccaagaagtctcaggaataatcaagtgctcacttctcaccttctgattcctgcccttttgatgacccatccccgcagtcatggggagtgcccatttggatggaaaagccctcttcccaccctatgaccttcccggggtggatggatgcaccaccccgggaatcatatgggaaatatggaaccaaacaatagcagtagtaatagaaacttcaggctgggcgcaggggctcacacctgtaatcccagcactttgggaggccaggacaagaggatcacttgagcccagaagtttaaggctgctgtgaaccatgatcatgccactgcactccactacagcctgggcgacagagccttgtctctgaaaatttgaaaaaggaaagaaagaaagaaagaaacttcaatattatcagtagagtccaatgttgtgaaacccctcattaactaaatttccatactcttcagtaggtagaaaataattactttttgattcattagaaagcacttaatttttaagatggagatcatgtaattttgaactctaggtcttgcctactcctatataaattctcctctaaacaacagccaaaattgaggccctctttgagcttcaggctggtgccaaatggctctgcttattttccccaaaataaatcttccttccatgtatgatgagaccccctccagtataaagaagacccaaagaaaatcacccaaagaaaaaaggcccaaagataagacccaaagacctaaagatttaaatatatatacagatacagaaggtttgtttctgagtttctgtagtgaccttggcaataccttgtagttcaggacaatcctgaggaacacagaagtgctggcttccttgaggaatcagtgatcaggactctcgagccccttgaaccccagcatagggcgggagggggtgagggcagcaggggtgggtgtctgaattaatgtcaggtctacgtgatggtgtcatcaagtgttccagataaaaagttttattgagccgggcgcggtggctaatgcctgtaatcccagcaccttgggaggccaaggcgggtggattgcttgagcccaggagttcgagaccagcttggggcaacatggtgaaaccctatctctataaaaaaaaaaaaaaaaattagccaggtatggtggcgtgcacctgtggtcccagctactcaggaggctgaggcaggaggatggcttgagccaggaagcagagattgcagtgagctgagatggtgccattgcaccccagcctaggcaacagagtgagaccctgtctcaaaaaaaaaaaaaaaaaaagatttattgattccaaagaggcatggccacacacacttagaccagcaggtgctttgctaagccctgatggaggctgccagacccgccgtcaagaggagctaagggtagtgtacaatgagcccacttagtgtatgacggccgctgccgtgggtggagtccttgtgagtaaccagccagcttgagcaggatgcactaatttgctctgcaaacccagccattgagaaatacgcctcagatgtaccgaactctaggtcctaggagtatgttggttggggtaggttatcaataccagcccacttgcagtggatgagctggtggccatttgtagtgaggaaagggatgtgtcaacctccatcttagactccacaattgagggatgtgaccaccattcctccccagccagcccccaaaccacgtttgttgctgcctttccagatcattgccatgaaggatggcaccatccagagggagggtaccctcaaggacttccagaggtctgaatgccagctctttgagcactggaagaccctcatgaaccgacaggaccaagagctggagaaggtgggtatatccagggatggccaagcagccacccctggatgcaaaggttctgctagaacctgaactcataaaggtcttcctgtccttagtgccccaggaagccccctaaagggcagatgtgggagctgggcatgaactggctcctaccagaggagagacagtacctgtgccaggtgcccagggcagaatcaggtgggcaccttcgccttatcctgaggtagtcagatactatttagttgcaaagtttcagaaaatcaactcaaactggcaaagaaaactaagcaaagaaaacaagagggaattaaggatttattgacccatgaaaccaaaaagtccaggtgtgtcatagctttaagtgtgctggatccaggtagtcagtgtaatcagaaatctgtttctcccatctcttgactctgctcccctcaaattggctcagctcccctcaaattggctccattctcatggtatcagtgagggccaccagcagtcttaggtttacattctcccagctcaacaactctgccagaaaaaaagtgcctctttccccatagttcagcaaaagtcccagggctgagtctcactggtccagtttggtcatgtgcccacccctgaacaaatcactgtggccagcggtgtggaatgtgaggattggcctgtcctgggtcacgtgccactttgggagccagatccacctgaatcacagagactaaaaacaggggaagagtggttccccacagggatatgggggtgctattatctgatgaaggggaaggactaaatcctggcaagatgaatgtgtgtctgtctgcccctccctcaggcagggacaaagtagaaatctgacattggtcatcaccagagtagttaccccttaacttccccttcccccaccaaccatatatcctgaagacattgcccaggccacatctgtcttttaggagactgtcacagagagaaaagccacagagccaccccagggcctatctcgtgccatgtcctcgagggatggccttctgcaggatgaggaagaggaggaaggtacaggcaatgggactgggagtgaaattatggcctgaggtctgatcagccacagagaggctaaggtttggggttctgggtgtggtgcagtagtgtgcctttgattaaatggcttccctctgtgtgcccccgttgtcccctcagtaagtggggataaaatgccctgattcaccctcagagggatggaaatgtgtagccacagagtgggttcttgcggcctgcagaggaggcagctgagagcgaggaggatgacaacctgtcgtccatgctgcaccagcgtgctgagatcccatggcgagcctgcgccaagtacctgtcctccgccggcatcctgctcctgtcgttgctggtcttctcacagctgctcaagcacatggtcctggtggccatcgactactggctggccaagtggaccgacagcgccctgaccctgacccctgcagccaggaactgctccctcagccaggtgtgactggcggcccatggcagaggttgggagtggggatgggggaagggctgagcccatgggcaccctggaactccaaatcactctctgcctgtgaaggagtgcaccctcgaccagactgtctatgccatggtgttcacggtgctctgcagcctgggcattgtgctgtgcctcgtcacgtctgtcactgtggagtggacagggctgaaggtggccaagagactgcaccgcagcctgctaaaccggatcatcctagcccccatgaggtacccgtctcccctggccaggctgggactgtgagcaagtcactgttctctgagccttagtcttcccatctataaaatggggatatacaacctgtcacaagcttgtgggggtgactcaaggagacagtgtgtgtaaaagtgccctccttgtgcaagaagcagggagaaactggcatttactcagccagatactgtgataggcattgtgtgtggttagctcatttaattgttaccatggccctttaaagtgagcgtctgcacatccaagtaaagattgttttctcctccctaagtgggtgtaatttgcccatccccacccatgagttcagctccctgccctcccctcactctctctccctcagccagcctcaggttttgacactgggggaacaggtagctgttctattaataatttcctgtaatgggatggataaaaatctcaaaggccacttgatgtcaaagaggtttaaagttgtccctgcccaattggttggccaacttggcttaaaaacacaacaggcaaacagattttctggccccttgtcgaggctagacctcacaatctaactgcactttttactttccagcctcatgagttttctgtggcccacagatatggcctccaagtttatttacttttactctctatttgccccagctctgtagttctgaaactccctggttggggttgggctgactctgggtcagccagccggcaggctgtccccagggccctgttcctcttggcaggttgtccctctggagaggactctgtgtcccaggaggacagctgctgagtcaggccgagccggcagctgagaaaggcggcagtcgtcagatgggcttgagaaactgaaaggctaacgaaaggccagcgcccctttgggcagctgcaggaattcacggggatacaggccagatgtctacaaattggcagaggatgccagacccatgaatgactccagagacacttacatgaaataattaactatctcattcagtaaacaggaagtaaatcaatggacaaatgagtaactcttcctctggctgcctcttaggttttttgagaccacgccccttgggagcatcctgaacagattttcatctgactgtaacaccatcgaccaggtacagaggaccgtgccacactatccccccttccagagacacctcggacccctgggggcttctcctgtctgaggctgggttccccagatcaggtgatcacagccctctgggaagaagccagtgtccccgatccgattataatgctgcttcagggctggggcctccctcgtgggagcctcacagtaaggctgagggaaaccagatccctttagcttccacctgagatcccactggctttctctagtaaagttccagcatattctgaaccaaggtggctgattgtatggagaatattcattttgattcagcctgtgttctttatttaccattgtaccagatggtgtgaaaacaaaatcttgattcctacctcagggagtttaccttgtagctggagagatgagatacgtgcctataataaagggagagcaaggccgggctcagtggctcactcctgtaaccccagcactttgggaggcggaggcaggcggatcacttgaggccaggtgttcaagaccagcctgatggccaacatgatgaaaccccttctctattaaaaatacaaaaattagccaggtgtggtggcaggtgcctgtaatcccaactacttgggaagctgaggcaggagaatcatttgaacccaaggggcagaggctgccgtgaaccgagattacgctgctgcactcaagtctgggcaacagtgagactcagtctcaaaaaaataaaggatcaaaaaataaagtgagagcaaaacatggcggccagtagcactctaaacacagtcaataccaaaattcacctcactctctccccctcgtctccctcagcacatcccatccacgctggagtgcctgagccgctccaccctgctctgtgtctcagccctggccgtcatctcctatgtcacacctgtgttcctcgtggccctcttgcccctggccatcgtgtgctacttcatccagaagtacttccgggtggcgtccaggtgatggcctcaggggtgaggggtgggaggtgctttgcaatgtgcagtttggtgtacttgctagactcatcgttatgagagtaatagggtcgtgttccctccaaaaaataaaaacaaaaaacagaaatgaaggaaatagaaatatccacatcttattccaccgccctaatataatagtctgccaacacacgcacacactgaggttgacatctgaattatttccttgggcgatatggtcaggactggaattgctaggtcatgataaatgcacattttatgcccttcattcattttgccaacatgcttcccaggagggttgcatcattctagtggtcaggctgattgctgatgcatgaaatcggcgggcacctgattcaagcagtgttatgataacacctcccagcccacgtgagtccagagtgtagctgtaagccttgacttgagggagcctctcacagccattctcatggatcacatttgccctcatgagctttggatccatgcacgcctctttcctcctcaaaattttctaagaatgttctctagggagttctttctgggagtgattctcccagattcatagaaactcatagattcaaaaaattgtaggaaaaaatttaaagaacgtctaggccagtgtttctcaaactgccaattacagcccatcagtgggtcatgaaatcaatatcatggatcacaaccagcatttttttaaaaatgaaaaaaacatcagactgtattcatagagtaaagcaagctttgcttcatgaaacctttgtgttggtcatggaggtgtgtgagtactgatttgtgagataaaatatatttctgactgcaggttgtggtcagaaaggttaagtacctttcccaagtgcacatagttggctagaaactagagttgagatacttattagcaataataaaatttagatgcattttggacacaattacctgccccaaaggatcaacatttgtataaatggctttttgcttggatgatccagaatggcccgacacccacacgaacaacatagctttttgacactcaaaaaattcaaagtgctgcacaagctgttctacaaagttcatttcttctgccagagaaacagcccagtctctgtggcacccagtctgaccctggagatggtttatcagggaaatcaacttcctgcatcccaaactggcctccctggcactgatgtgcttgtcgaggtgcagctttggggagcaggaggcaattctgttgccatggaaacctctggccttaccccgagacgaaacctatcatttcagcacatcactggccagggtctaaagagctccttgatggggtaagcggaagacggggttgaacgctttgagtttggtcttctgttcctttggccagctgtctcaaggttcagattgttcacctgtaaaatggaactagcactgcctgcccagccttagctcagctccaggctgtgcagcagaagtacagggacagatggcgacctggggttgacaatgcccaggacagcagtaattgtgccccacatcaggctgtgtctaagcattgtacataaacgatctcattcagtgctcacaaaagctcaatgggctggtggcattgtcttcccccttcacggggtaagaagctgaggcctagagaggtaaggccattcacccacacagcggtagcaggtggagctaggcttcaggcccaggccgagccctgagcctgccctcttaactgttccactctgttccccgccacagggacctgcagcagctggatgacaccacccagcttccacttctctcacactttgccgaaaccgtagaaggactcaccaccatccgggccttcaggtacgagtccacattcccccaaggtaggagtggaacaggggtggggccagggggcacaggccatgagatttgattctcaggactccacttgggaaggccaaggacacgttctctctcaagctgcctcaggtcccaaggcccaagggatatccaccagcagggacaggccaggtgggctcccactgaatgttctagagaggaaaattccagctctgtagacaagcccaggacctctgtgaggcagagcatgaaaagagacaaagctgggacaagtcttcatgtatcaacgctagaaagggccttaggtgcgggccaccctaagcccttcttttattaaggagcccctgtgtgccaaacactatgctgagtactgtacaggccaatcccactcattctgcactgcaaccctcggtgctgagaatggtcatttccattgcacagacaaggaaactgaggcacagagacgttctataacctctctgtgtaaggtgccacaaagcccagacttgaacctatttgttcatgcaacaaacatttactaagccccgactatgtgctaagccccatgccaggcactaaaaagatgagtcaaataagccgctgccctgcaggcgtttacagcccagactttgagcaggccaggataaatccacgtgacaagtattctgaaaaaagcggattcaagggctgtgggagcatagaagagagacagtccgggaaggtttttgtaccagaggtgtcatcagaactaggactcaaaggaggggcaggagttcaccaggctgaggaattcctgaaaacttcagtgcccctgccatcgtctcactaccctgagtggtgatgttggggtggacaggagcatctgaggttgcctggggaatgagggaagctgttgtttcccactccccaagagtctgtctgatctccagaggcatctctcttccagtcaggcaggccagagacccctgacacacaaagttgggctcttttctcatcttcatccagagagtgataataggttatttttagggtggcacagctgcacgaagtatgacagtaaccatgagacaccaagcactgtgtccaggagtaaccatagggcacaaggaccagccaagggccagagaggcttacatctcctccccccaacccctgaagtccagcttcagccctggagaggtatccaggcccctctgcccaccctggagcacctagggccagtggaaatccacctcttagggatcttgtctaagtaaagaagagcagagcaaagctctgccctggccttggcgctgctccctggacatcccttgcccctggacaagcctatgctgtgtcttccacaaagaagcttgctggggactggattatgactctagagtctcctcccagcctcctcttctcaagcctgaacttctcccgttccttcaacttccaggtccctcgacattactgagcctagcctttgctctaagttttggtgatttccctctctcaattggtgtctcagagggccctggggtagagagatggtgactcttctagagtgggccacagccccttgtgtgcagatcccagcttcctgtaaacagcctcagatcaggccaaacctgtggtcagccagagccactgctacccagtgaggtcttccacaccctactgacacggtgaatgatttttaaatttgaatgaaaggctttttaatcaaccccatacacatttaatgcattggctttaatccagcagcctgttgagagctattagcacttattgattgcccacttactgtatgccaggcaccgtgctaagtgttgtatgtgcattattacatttaatcctcacaaggaccacataacataggtacgaatcgccacattctccagatgcagaagcgagacccagagaggctgggtaatcaatccaaggtcacacagactgcgggggctggcgctgagcttggaacccaggtttgcctgaccttctgggctttcctaagagatcttattttttcccaaaagagtttcaagagtgcccagcactgggctcagtggcgggctcggaggttgttttcgttcatgtaggaactatcacttccccatttttttcataagaaaactgagtctcagtcctgatacacagccaggaagttgtgatgttcaggctccaacctgggtttacatggctccgaggctggggctcttttctagtcctcagacacactgtcgcacgcctgtggcagaagctcccatctcacacttgccgaccctcaactcacacagtcctgagacccacatacgctgagcgcctcacactcctataacacgcacatgccctgatgcacacacattttcaacacgcacttactctacccttcaggcatggtttcacactcactgcagacacgtcaccctcccacacgtctccaccctgggggtgtgcagtagcatgctctctcccacctcagaacctcccttcagtcccctcagacacatgccctctctccacgcagagacaatcaaagctgaactaacaccttccagggtgaaaagcaaatgcccagtaaggtacgtcttgggtgcctccgtgtcccctgagtttggtcctatcaaaccagcgatgatgaggcagcttttctttcgttccttcctccatcatcaaacaagtgctcctgcatctcctctgggccgggcctacgtcagcaaggtctgagggaagcggccaaggagagtgatgacggcagcccaggttgatcagagaaaggaggcaggtccatgcgcagtaactcagggaaaacatgatgaggacctaaggatgagaaagaagcctccagagttccctgtgcagagagattccatcaatttcagagggtcaggggagtgccatgcattcatccaacaaatatttattgatagtgccaggtgctggggtatattggtgaataaaacatcttcatggaatttgcagtctattgagggagatgattataaatagctagagaaatgcatgtacagcagatactgtggagcaaacaggttgcagacaataataggggaaacctactttatagtaaggtagtagccaggaagagcctctctgaggaggcagcatttaaggcaagccctgaaggttgagttgagccagccttatgaagagcaagggcaaaagccttccaggaaaagggaatagtgtgtgcaaaggccctggggtagggaagactttagtattgtcacagagcttttaaaaagctgagtggctgcagcatagtgtgtggggtgtttgtggcaggaattaggttggcaggagggggttcttcatcctataagcagtggaaggtcattaatattcttttttatttgtttttttttttttttttttttttttttttgaggcagagtctcactttgtcacccaggctggagtgcagtgaggtgatcttggctcactgcaacctccacctcccgggttcaagcaattatcctggcttcctcagcctcccaagtagctgggattacaggtgtgcaccaccatgcccagctactaatttttgtattattagtagagacagaattccaccatgttggccaggctggtcttgaactcttgacctcaggtgatccgcccgcctcagcctcccaaagtgctgggattacaggggtgagtcaccgcatccggccggagatcattaatattctaaacagtgggggagaggacacagtttgcgatttagatagattaagccagccactgtgtggagcatggactgtagggagacagcaggtagacgtattcaggaagctgatgcagtagtccaggtgagagtttgtggtgggcaggaagcaggatagagggggagggaggcaaggactcttttagagagagacataagaggacttgccaaggggctgaatgtgaatccaggtgattcctgggtgagaaactgggtaaagggaggtgccccttattataatgggaaagacctagagaaaatggatcttggggtgaaaacaagagtttggaggaggtggggattctggacaggtttgaataagcagaaaggagtggggtggacattccagagagggatagcttacatgaagtggccacggtggcatgtctggggactggaggggccctggagcctccctctgcaggtagggagactcctaggagctatgtggaccaacactgttcccttaggagcttctcatcctccctccaggtatgaggcccggttccagcagaagcttctcgaatacacagactccaacaacattgcttccctcttcctcacagctgccaacagatggctggaagtccgaatggcaagtgctattcccctctaccctggcctctgataggagggtggggccagagcaagagcacacaggtacctggggatgaaagagaggataggataccagatcgtgtggacaccaagccttcctgcttcccccagccctggtggtcctcctagtgtctagcctgtgctccttttccccatatcactgcctggaggcttgtgtatctgaggtgtgtgccagtggcaagaacagttgtggtgaatgtgtatctgcagtgggtcatatgacacccacattgtgtgtgtttgtgggccagctgaggcgtgcatgttaaagggtgtgcaggggctagggggtaggggagcatgagcttgtgggacatgttggctcctggggctccagccttcgcagcccttgtgtgtgtctggtgacgtgtgcatgagttgcagggctggagtggaggcctggctgagctgctctctgccccgaaaaggagtgaggtagaacaggggcctgtggctctaacccctgagcgcccaggtcagctcctctccctccccaggagtacatcggtgcatgtgtggtgctcatcgcagcggtgacctccatctccaactccctgcacagggagctctctgctggcctggtgggcctgggccttacctacgccctaatggtgagcggcagtgggctagggcagaggaggggtcagacaccagcactcccggagcaccttcgtcactggagacatgagacactcccaggccttaccccaatttcatttgcatctgatgccagagggacagtgcgggcaggaaggctgaccagcaggccccagggcccaggccccagacaggtggaggttggggagccacatgactgaccctccctgtgcctccagggagggctgctctgagcaggcagtggatggcagcaaaaggaatctggggccctggcccctctccagccttaagaagagccattctggtggctgaggacagaactaagcgaccatggagtgtgcgccactggcttgctccccacaggtctccaactacctcaactggatggtgaggaacctggcagacatggagctccagctgggggctgtgaagcgcatccatgggctcctgaaaaccgaggcagagagctacgaggggctcctgggtgagaggctcagggagaggggtggggaagagtccaaggaggagtgtgtctgggttgggggccacaagggagcctggggatggggtggcactttcggatactagctgtggcccatgcctggtggctgagcccagcccggcccccagcaccatcgctgatcccaaagaactggccagaccaagggaagatccagatccagaacctgagcgtgcgctacgacagctccctgaagccggtgctgaagcacgtcaatgccctcatcgcccctggacagaaggtcagagcacgggcccaacccaatgctgcaggacaggcgtgagcaggggatggggcatgcacggagctggatggcttcgcagtcacctcgtggccctccagggccgaggcctctcactattcagacatcgcagtctcctgccctgggcctgtgggggcccatctttcctctccttctattgccttcccccagtgctgccctcaggccttgtcttctcactcatccaccaaggagaccgacactctggactcccccagctcacacgggctttgtcagggcctccctctctgcgaatggtcaggggctttccctagggcactgccccgagcttcagggcagggacctgggggcagacagcgaggccacccttgtattgagggtgagcccctgcctatggccctggcccagctctcctctcgtttcccactctgtctctttgtctctgtctcactttgctgtggctgtccatgtcattctctgaccttgggatgtacctctgtccctgcctctctcatccttctatgtcactatctgtctccgtattgtaatttctgttggtacccaagtgccaggaagcaacgggatcagaggtggctccattgtagggcggggcacacagacacatccatgcataccactctcagctgcccctgtgtcctcctgccacacccatgcccatagagacacaccactgccccccagctctccttcagccaagtacccggcacacccagacccacaccaaggcccaggcaaatggacatccatgcctgcacttgcgtgccggtccctgtgtaagccctctctggacccactgcaggaaacaagcccaaacctgtggtgtccaaagagaaactagtcagaaaaccaggccaaaaagataccctgtgacctcccacacctgcacacacacccagagctagcatagaggctattcccagcagccccagagtcccagtggcggtgcctgcttctctctttccagatcgggatctgcggccgcaccggcagtgggaagtcctccttctctcttgccttcttccgcatggtggacacgttcgaaggtgagttgtaaggcgggcaccccacgtgtacccacagccaccagatgaggcctcagccctggcacgtggtcagacatgacaggaggcccagcagtcaccgccttcccctgcaccctcactgggacccatgcagggcacatcatcattgatggcattgacatcgccaaactgccgctgcacaccctgcgctcacgcctctccatcatcctgcaggaccccgtcctcttcagcggcaccatccggtgagccccaccacccctcaggcccacccagccccaggccggctcagttccatcagatctggagcacaaagaggagggggttgggggagaccaggatcccagaggtgtttcctgctcatgcccttctccatcccatcaggcccaggcagcctctggaaggggatcccccacccatgggtctaagatgctgtcccccacccactgccaccacctcggtgcttctcccagccagacctccaactcagtctgctctcgctcactgccctctttgccgcctggggatgcaggcaggaccctgctccctccctactggggctttctgtgccacttccagatttaacctggaccctgagaggaagtgctcagatagcacactgtgggaggccctggaaatcgcccagctgaagctggtggtgaaggcactgccaggaggcctcggtaactactcctggctatgcagctgggttggttgggcactcaaggaccctgtaaggatggcagacagaagcccgtgtctcaggtttgccccaagtttggagtctgaagcctggcaggaccatttagtcctacttctcactatacgggggcccagagaggtcaggtgtcttgccccaggtcacacaactggtcagttcagggtctggctcctcctgcagggtacagcgggtacagtcagggatccttgtgagacagagattgcgagtcccccatgccaagggggcatcttcagccctgccctgccccatccacctgcatgcccagttctgccttaggggaggagaagatggactgggcaatcatagacacgggtcactcatcaaggccaccggtgattggcaaagccttggtatatttgctgcagctcctggagcattgggggtggccaagccttggtttcaatgaatcaccctaccaaggccctacatacacactcagtgcacccctcagtgcacacgccccctcccagaactgcccagggccacagcagcacacacctccaggggtgcccttctcgttgcagtccttgcagacggcctccacattgttgtgtcaggtgcaccagccctgcacacgcctgtgctcttggacacacacccacctatttgcccccatgcacacattttccaacagccccccaagccatcccatctgctccactcacagcacaagattaactcagtcctacttcatctccccgggctgttttcagatgccatcatcacagaaggcggggagaatttcagccagggacagaggcagctgttctgcctggcccgggccttcgtgaggaagaccagcatcttcatcatggacgaggccacggcttccattgacatggccacggttggtcctgggcccctccatgggaccatggtcttggaaagggtttagtgggatgctagggagaaatttgcacgaagtagtcctgaggctcaagttgcctctaacatcaaatgctatgtgttgcagaaaatgaaaagagctggggggaccctgactctgtctagtcttagggaatgttacacacacacacgcacacacaaaaacactatgcaaacacacacataagctgcacacacagacccacacagacttcacactgtcacctatcacaacagcacacacacagccacaaccacaacctacatacacacacagagctgagctcccaacaggctgagtccagtccctgagtgccgggaacctgttcagtcctgtggggtgggggtgggactaggatcggggtcagatgggagctgagccacagacctgggctccacatcccccaagccaggccagaccccatccactgggcaggtgagccaacagctgttgcccccacttggcaggaaaacatcctccaaaaggtggtgatgacagccttcgcagaccgcactgtggtcaccatcgcggtaaggggcccattgatggggtgcagagggacacccagggacaggactggcctgttgtggccgtcatcagtgcacagcccctgggcttgcctggtcccagtaatcaagaaagaaccctgaagcaggcagttcagggcaaggggcctggagggcatgcagggagcctgggttgcaggatttggggtggggggttttgcccctgtgcttccctcagacctcccctctccttctccaggttccaaggcctgcccctgtcccaaggccttatatgttaggctggcgttacttctccataggaagtgggggaggggttgtggagggtctctgagccttgaagcctggaggtggggtagagttgggacttggagaggagagaagggtggtattagcagatggagagcttgtagtcacatccaccccaggaaagtgcagtccccacagtgacaggacattctggccacatgcctcatcctcctcctccaagccgcaggagggccaccctcagctgtggcccccaccgcgggtggtattcccaccatcctgacccgccccctcctgccctgcccagcatcgagtgcacaccatcctgagtgcagacctggtgatcgtcctgaagcggggtgccatccttgagttcgataagccagagaagctgctcagccggaaggacagcgtcttcgcctccttcgtccgtgcagacaagtgacctgccagagcccaagtgccatcccacattcggaccctgcccatacccctgcctgg

SEQ ID NO: 15317 - DNA, 35073 bp, Homo sapiens
atccccattgcagctgtcctcatagtaagtggatcctttctccatctcttgggggtagggtggagggggagggcgtctgcagtgacaggctgcccagatttggcctttctgcacaggggcctcagaagacaggctccacagccagactgaaaataggatcgaaagtttatagagggtgtggcccctccccaactccagccgaacaggggcctctgcctccaggcctggaagaccggaggcttagtatttagagaaattaaactttcttttaaaaaatagctatccaaatttttaatttttaaagtgaaacatgtgtattgtagaagtgatgggaaatccagaacagaaagctcaaagagaattaaaatcacccataatcccactggtaacatttttaatgtgtttctttccagtctttttttaaggcctatgatatgtcattttctacaaaaataggaatgtgctatgcatgcagttttgcaacctgctcttttaaatttaggaatatgccacacacaattctccatgccactgaatattatgatggtggctttctaaagcaattttgataaaagctgtgtgtgagctgagccatgggggtcaagcagcatgctcctacagaaaggcctgggcccctacgagcctgcagccccctcacccagcctcccatccccatcttctgtgatggctgcagttccttaaaaagatctgcttatttcccccggggccagtgtccctgagctgtgtagagttcacagcctgtcggatacacttgggaattcacttccaatgtgatgtattgagctggttcctggcctggctcctgggggaactgtgggtaacagaggccactgagccagccaggtggctggggcaaagcactgtgcagtttcgtaatcactctgtttacgttatcccgatgaggactggggagatgagcaccccgcctgctgtctgcagagggggccgtgctgacctaacccgagatctcctccctgcttattcccagccaagactgggcaggacagggagtcttggccaggacagggagggagcagcccctgctctccagcttgaagtcctgaacttgttggggacgtttccatgagatgactgtggggatgatgaaggtgtctccaactaaaagatcctcttaggagcctgctccctgacagccctctcatttcccttccagtgctgagcgtttccagtgtgggagggacccacaccctgggccaccctggcctcacttgtgcctctgtccacagactttcgtgggccacgtcagcttcttcaaagaggccgacttctcgccctccgtggcctttgcctccctctccctcttccatatcttggtcacaccgctgttcctgctgtccagtgtggtccgatctaccgtcaaagctctagtgaggtgaggggagggtccgggcgagggcactgggcaggcaggtcctgtgtcagcctcaaggcttgctcgagtgatggccaaaccacagctgtttggtcccggaacacacccccattgctgggccttgctgtagctggtcctggttggtcagagggacattggcctgtatggtttcccagctcgccatccctgagcaaggacttgcttacatacctcccaggagaggggactcactgtcactttcacgacaacttaaaaaaaaaaaaaaaccagtgttgagccaaatgtggaatcctcctaaattctacccactggtcctaacttcaccctccagagccaccaagaatgaggccatcccgtccccacgtggctgccccatggatatcagaaggcatccactgtgtctatctttcccaggccaagtatcccctaccctttccacagcccctgagccctcacagcctcagccagtgaaacagcttcccccaagcgctgggtcctgctctgattggcccacagctcttggaggctcccacttccaggctctagagcctcatggggactctgccactgtcccagaggcattgccctcttgggaatgaaagcctgaaggtagaaggctgaggctttggctgggaaatgccctgtctggagtgagaagatgtccttgggcctctgaagtagctctgcctccttgaaagcaagagcctgtcatgcctctatggagggctggcttgtccttacccatggccagagaaccagtcagtaacaaatgtcctctgtgtcttcagccttgaggaaggtgacacccctgtctcatgggaccctggcaggtactgggaagctggaaggaaggagtagctgttggaatgaagtagctgatagagagggtagcttgcagggggagactctagcatgggttcaaagatggaatggggcataactcagcaaaattatgctctaaggagtatctgaccaggcagtagctggttaaacagggattagctcccatttccacagtcggctgtgctgactcagtttcttgaccagggtgttgtggggtctgaagatcacccctcctcccaccacccactctccagccctatgattctgtgtagaaaccacagatttaagaacgctgcacctgcctgaaaactgttgcactgatcccaaagcgttcatattttcaaacactctggatcccactgtttccaggaatggaacaccagagtagcagaggccttttcagtgaggcagctcaggctctggctgaaggtgggcgcaggacactacctgaagcttcaccccaagagatgagggccagctccactcttcccagtcaccgcctgtgggggagggaggctggacagggcatgaaggcagagcctggtggtctgcccctcccatctaggggtggcgcacagaaagggagactccaggccacagctcacttacaccccagaataaccttgccttgagggtgggatggcttgtctgccccaggcctgttggacatttagcaaaagagaagaaaggggaatacaaacaatcctgagcttcccagaaagctttcacacctccaggatgggagagaatgaactagaagagtgaagcttccagtgcttcctcaggtccacagggaaatctggacaggggagagggtaggaatagccgcctcccccgtgagtaatgacacctcctccagcaggctgttatggggatccgattacataatgctacaaaacagttaacacagtgtctggcatttagtgtatgctcacaaaatactagctattgattctttaccaatcctagtcctaactaaccttaaccctgaccaatccaacaccaaccatccttcagtctaataacccagactaactaacttcaacattaaccctaaaactaaccaatctcacctccaatccagaccccagcctattccagctgactggtcaaccctagcaaaccctggtaacaccaattacctgcccccatgcccactggtctgcccccttcagtgtgggctttgtgggactatacttcaggcctgagatcctgctcagagctctctatcaggctgcgccctctcccctcccctctgcccctggcaggggtgaggggtgtctctgtgcttcccgagcagcgtgcaaaagctaagcgagttcctgtccagtgcagagatccgtgaggagcagtgtgccccccatgagcccacacctcagggcccagccagcaagtaccaggcggtggtgagtgcccggcctccccttgctactcccagcatggtcctctaaggcccaaaacttgggcctgctgtgtcggacttctgccttttttcccaggaagaggggctcccttccctacacagctcccagcccagtgggtcctcacctccaaaccacccccagcccctcagggttgtgaaccgcaagcgtccagcccgggaggattgtcggggcctcaccggcccactgcagagcctggtccccagtgcagatggcgatgctgacaactgctgtgtccaggtgagtcctgctgccccatgcctggccacccagcaccaactcccagagggagctcagcacctggaaagccagaaagctgcatgcttagtcctctgcagaggtcaccctgcctgcctgtacggtccataggagtccagaaaccagggaccaccaagtggggggacccccagccttaggcaagggtcagcatgagaaggccagtctcccactcccctgctctggaagtgatccaggggctggaatcagtgtcttttggctttcatggaggaggggaagccagagactattcactgggaactggctgcctttctgttctctcctgggcggtgggacacgcctaatgaagatcatgggaggctacttcacgtggaccccagatggaatccccacactgtccaacatcaccattcgtatcccccgaggtatggcccagtccacccctccagcatgcccctccccatgtcccactgaataacatagagataaaaagacaaagctgcatttattgagcacctactctctgctcattcttggtgtatgccctgggtatattatagaaggggaaggctacattctagaggcttccgtgtgctgggtgggagtgaagcactaaggacagggtaaaattgccagccttaatgtcaaaccatccattgcagacagtataggtaatgcacaaaaagatcagaagtgggtagccaaggaacgcaagtggaagtgatggggtttctgagaatggacaaaggccctgaggccatgaggcaggaggattttctggcagaggcagccatgagcaaagtatggaggtgggttggaggtgggacccaggatggtgtttcttgggaccacaaggagcctgggctcatactaggagcatgggaaaggagaagcgagtgcttaggaagggtggcggggcaggaaatcagagagggggaaggacctggggagccagaggaggatgttgatttccagaaggaaaggattaaagagggagaggacttgctggggattctaggtaggaagaaagaaaacaggggccccagggttgggtgcatctgtctgtctgtctttctgggtaatggttgttcagactcccccggccccactcacatctgccaccctccctccctgcaggccagctgactatgatcgtggggcaggtgggctgcggcaagtcctcgctccttctagccgcactgggggagatgcagaaggtctcaggggctgtcttctggagcaggtaatacatgtatcctcagggcccagtggaggggaaatctccttttaaccatcctcctcagttgaggatgcacacacatttattggagggcccactctgtgttcagtgaggactcaataaatgctgctaatggatattctcatcatcatcactagtacgtattcacctcttactatgcgcaggttctttgctaagtcctttgcatgcattatttcatttaatttttatgataactaacaaggtccatactgttctcaattctcatttatagaggaaggttaaactatttgtcctaattcacacagctaataagtggcagagctggaattgaaactcagttctgtcagactctgaatcccatggttactcagatgcacggcagtaatttcccagtgtgggaaattgcaacaccaacattggtttccagcttggtcctgagctgcactgacctacacaccataagtgggtgttctgaagatccagatgtaaccaataaatgttggtttctgggcaaagatcactgtcttaattaaagagccagaaccccaggctcagtcaatcacgaatctgttatttatacccacctacttccaagaagcacttgaaactagttgatgaaagattcatgtaaaaatcaaaaccacaatgagataccatctcacacccgttagaatggtgatcgttaaaaagtcaggaaacaacaaatgctggagaggatgtggagaaataggaacgcttttacactgttggtgggagtgtaaattagttcaaccattgtggaagacagtgcggtgattcctcaaggatctagaaccagaaataccatttgacccagcaattccattactgggtatatacccaaaggattataaatcattctactataaagacacatgcagacgtatgtttattgcagcactattcacaatagcaaagacttggaaacaacccaaatgcccatcaatgatagactggataaagaaaatgtggcacatatacaccatggaatactatgcagacataaaaaaggttgagttcgtgtcctttgcagggacatggatgaagctggaaactatcattctcagcaaactcacacaggaacagaaaagcaaataccacatgttctcactcataagtgggagttgaacaatgagaacacatggacacagggaggggaacatcacacactggggcctgtctgggggtggggggcaaggggagggatagcattaggagaaatacttaatgtagatgaagggttgatgggtgcagcaaaccaccatggcatgtgtatacctatgtaacaaacctgcacgttctgcacgtatatcccagaacttgaagtataataaaaaaagatgcatgtaaaataaaaccctttaaaaaggtaagaaaataggaactgagaaatgaagagggtaaaaagatgttcagcaacctgggcagaggacaactacagccatcaacataaaacctggctctgtgccctctggtagccaagggaaaaagggatctctgggctttggagtattcatttaggaataaaagttgcagccaatcagcagaagggcaagctttccctaccaatcatttctaggggaaaattattgaaggtgtcaggtttttcataagcatgagtacagaactgagcagggagaaagactttgggcccaatgtctgaatatcaacatgcacccccgtttcctgcatttccaagatgtccctgaatggtgtatccaaaagatggcaaatttccctcctcagtggggtcgtgggctagcagatgagccccttgggtttcccatcacctcccatcagggactgtgatgtctttgggggcagaggggtctttgcctccattcgccattttatttgggagatttttcaacatagcctgactgggaaggcccaggtattcggtttgagatcatattgccttattccgactgcctctccagcctttggagggaggagcccttttctgctgtccaactgcatgcctgcagcaagaagacaagagtccccagtgcactgtgagctgaagaaagtaaccaatatttattgggtacctcctatgggccatgccctttgctaagtgcattgtcaacatgatctcatcaagcctcctactaagtttaggaggggagtgttgttaccccatttcacagaagcagaaactcaggctcagagaagttgggtgacttactagtcagtgtgtggagcagagactctgcccatgttctttccctcaaacctggtcactgctggggcccccagggcctagtcctaagggttattgtccaagccccatgtagtggtcaggctggatctgggctctcctccaaggcagggcttttccagaaggattgcagggctcagacactggagctgcccctgccttgacctgctcagcatggatgtcaaaacccactctgaacctggtccctttgccctgctttcttctcctcccccaccctcatgccctcatgtggcatcgtgcctgcctcaggagctctccttgtcctatgtagatgaagcaggcatgattggcaggggtctgctctgccctgcctcagtccccacctcttctccaagctgtgccaaccctccgggtctgactgctgcccctctctcttaggaaacctctgccccagcccagggaacacaaggagcctctccaaggcagaggaccctaagcacttcttttttttattattttttattttattttaggttctgagatacatgtgcagagtgtgcaggtttgttacatagctatacatgtgccatggtgctttgctgcacctatcaacctgtcatctttttaagccccacatgtattaggtatttgtcctaatgctctccctcctcttgcctcccaccccccgacaggctcggtatgtgatgttcccctccctgtgtccacgtgttctcattgttcaactcccacttatagtgagcacatgtggtggttggttttctgttcctgcctaagcacttattataggccaggcactgtgcaggcacctcatcatctcagtcagtctgcaccgaactctgtgcagtagatattattatatcctcatttatcagattaggaaactgaggtgaagcaagttgtccaaggccacccagctgttaaatggcagaagtgggatttgcacctaggtgctcaagtgcattggtttgccaccatgtgctcaaagagaaggggcacaagagcctcatgaagaaggcatagctagcctgacagtccaaaggccagcagccgctgtggccatgactcacacacacctgcctcctcccagaactgccacgtgggtcctcacagctctgtccttatcaacacttactctcctttacaggtagcctaggccccagctcccagctctgttcgaggctcgcagaggggcggtagtgaaggggtctcatttctccaggatcctctttgctctctcgcccggtcctggtccagcttccctttcaagcatagtgaagtgcatttgttagcttgcagccaaccctgggaaatcatgagaatttgttcccaagtcaactcattctccagcgtccacagtgacgtattcactcacccagttgagcgcctagtgtatactagaccctgtgacagcaacaggagtgcaaaggtgactaagacgtggcccctgctttttttttttttttttttttttgagacggagtctcgccctgttgcccaggctggagtgcagtggtgcgatctcagctcctcacaagctctgcctcctaggttcaagcgattctcctgcttcagcctcccaagtagctgggactacaggtgtacaccaccatgccggctaattttttgtatttttagtagagacggggtttcactatgttggccagggtaatctcgaactcctgacctcatgatccgcccgcctcagcctcccaaagtgctgggattacaggcatgagccaccacccctggccggccccgcttttaagagaggggagagaagacctgggccttagaagagctcagaggaaccacaattgactctgcagtcaaggagaggaggctcactgcggatgtggtatttgagccttgaaggatgagtgtggtttcatcaagtagaaaaggcagggatgggaaagggaggtggtccaggcaggggtgatggtgtgggcaaagccttgctgatattaaagaacatagttctgtgcacctggaacactggatgcatggggtgcattatgaaagatgggactgaagaagtgaacttggcttagatcccatgtagtaggtctgagaagtaagatttaacccaaaggttgcaaaagaaccatgcttgtgataaaggatgatggattggggaaacagagaaaaagacagacagactgtaggaagggaggtattagcaaataatcataacacagtgtgaggtgtgcattaatattcactcattccaagtattgatcaagaagagaggtaggtactgggttaggaaacagcttgggcaaatgcatggggaaatgagagatgtcaagatgcattctaatggcagcctcttgaagatcttaagttgtttttggttcactcatttcgcaaatgaattcatttagcaaaagcactatggatacagtgcttacctctaggaagtaagttttagcccaaatgctgcagaaggatcatgcttatgacaaaggatgatggactggggagagagaaaaagaaaagacagacagactccaggaaggaaggtcagtctgcagctccttatagtggctaggagaaggagtctaggcagatacgactcaattagcttcatctgctgtttgtctctcaaaatctagacatgtgcactgctctggctggcccacctatcctgggcattgagttaagtgtgggggctgtgtgttgagagtccccctccattactggcaggaactccacacctcagacattgagccccaggtctgcagggagaagacgtgcttgcaaagtgagctaaaagcaaaacagcctctgacctggcaagcattcccaagtctgcacgcctgcagccagaggagagggtgatgccaggctgctgctcagatgcttttcagccatacccaggccaagacctggtgaccaggcagccagaaggagttccaggaggcacaaggcaggaagttgggggattaggaggtgtagaatggagaatgctctggggagatgggtgctttgttggtgcaactattcgtttattcctccagtgaccacgtgagcagtatggctgcacacacaggctctgcagccaagctgcctgggttcacatttggtctctgtgctttggaaaatttcataagctttctctaccagtttcccttattacccatgagattgatgtgaggattaacctagcatgtagtaaatatcctataaatattattattcaatagtgtacttctttgccaggaacaaaattcacctgttcctctttaaatgtcctccagtctgtctcctgggaaagattcttgtgagctccctggggacagggaccatattttgtttgtctcactgtatccgtagtgctttttgctaaacgaattcacttgctaaatgaatgaaccaggaacaacttaagaccttcaagaggctgccattataatgcatcttgacatctctctcctttccacatgcctttgtccgagctgtttcctaacccagtatttcactacccctcttctccatcaatatttggaatgagcaaataccgttagtgcatacctcacatggtattataattatttgctaatgcgtctgtctcctccatgactctgagctccttgagggattattccatgttgtaccccaggtgccccatgcagatgtgtattttgtgcactgttctgtgtaggctacaaaggaaaaggcctagcacctgcccttggggagctcacccacccaggatggacagaggtgtgcagacagagctgcagggtgggcacaaagggtccatctgctgaagtcctgcagatgcagccccgagcttgtccctcacgtcagcagcctggctcctggtctcagagagaactgtgtggttcccaagcattcactttaggaagaatcacttgcccctccctggctctctgcttcaaggaactgtgacaaccttgggatttgcaaactctctctttaatccttaagaggaaaatgttttggtaaaaagtcaagattagcagatacactcgggtgaaattctttccctggaaataaagaatagagccattaatatccacagtagagtgactttaaatgcccccggggggtcagcaggaaccagggccctgaggaaaggatcagcgtggggaagaggctcccacttccctgtgaggagctgcacatgcagtctcactggagctccctgctgcaatgctgttgcctgtggtggttggtgtggatgctgcctgccaagagccctgattccccaggaagagagaaaaaggcttctctcaggacggccctggtcgcatctgcctgtacaattcctggagcctttggggagctgaagtcaggggctcaagtgcccctgggtttcctggaggaggcaggtgtggtgagacagctgacagacaggagaagggatgctctgaggaagtgactgtccagccatgggaaccagatggcccctggctgtagtcctgatgctgccacttgctagctctgtgaccttgagcaggttacttcacctctctgagacagactcactgtctggacaatgagtaaaaccctacctttcctgtctcagagatttggcaatgggacccaatgacatcaattggaaaggatgctgtgggtgaaaggtaacctttcaggacagcgacaagcctgtctgggcaggatgaatgggctgtggagccctgtatatcctagctcactctttgaacctcagtttccacttcttccctttttatttattgccggggtcttaaatgagtgttgggggtatctgattctccctctgcctgtacttttggggccaagcactgagctgaaaagacaattcctcctagttctccaagcctacaacctgccccctaaccagctgtgagctgtaatacattctccagtgtcactgtgaggtttgtgccttcacccccattttatagatcaggaaacagaggctcctccaagtaaaggagcttgcctcagatttcacagccaatgagtggaaaagcctctgggattcaaatgtcagagcccatatttttcctacttctcgcacctgttatcatatgctgcctcttcctttaacctgcagttccctcccttcacctccaccgtctcaatccttcccactctttaaggttcagttcagctatgacttcttctatgaggctctactcattttctcagatttcttcctcctccaaatttcttgtaaaaattatgttttttctctgattctaaaagaatgcacattacattagaaaagatacacaagcatacagaagataaaaaccacctaatatcccatcacccagaagcttccagtttttctttatgcatttgcatatgcatttgtgtttacttttccccaaaagttctccgatactttgtcctacttttcttttgacccttataacttcctgacttcggtacctttctgatttgccctaccagagtgtgagcccctggaaggcagcctctgcaccctgattcaggttgccacacatatgccagctcctagtgggctggagggaaggacatgcggttggggaactggaagactcatgctttcagctgtgtgcttcctccctagagtgcaggcagaggaggaatcgaatcccctcagcactcttgtaaagaccacagcaatgagtgagagatggtgcctgccagacataccattctttacttttcagcttaaaacagatacaaagtttggggaggctcactggaggaggcttggggctacactggaaagagaagaacttggattcacaccccagcttcccctcttcccagctctgtcacatttgcaaactctgagtctcagtatcctcatgtgtaaaatggggatagggtttatagggttgtaaggatgagatgatgagttgtttgcaaacaacttctcacagtgcacagtgaaggtcagcaatgagagccagccccgccctttcttctttccaaatgattaatatatctgttaccagcctccattcattatatagctctgtcatgtgctaagcaccatgggggctgaaaaagatgttcttcctgccttaaaattccactggggatgaacaaattacacgggagctgatcagagaggaaggcagtccattatgagggctaattgagcagtgcagaccatgttgcaaactgagttagggcctggagagcttactgtgtgctggggtcctcaggaatgccacagatgcatcaataaccacctctgctactctggaagtagtcacatcaggaagactccagagataagcttatctgggctgtggccacagagctggaatttgtaagctttaggtttctatgtctcatgttaccagcttgtctataaattgtaaattacagccatctgatggttagggaatatgaagtttggttaagagaatgaaatgagaccacgaagattagagaacaggaaaagaggggactggggactacatacccatcagaatcttcattcagtcctgaccctcagcaggagggggatttcatcaggctcatttccatccttgatttcgtccatcctggttctcctgacaaggggcatttatcagagttatggcatgggaaatcacaggggagtaatgtaccatggcatttaagagtatgaacgttggagtcggagctattttctccgctacttactagctgtgtgactttgggcaagttacttagcctttctctgagcctcactttctttatctgtaaagtgagggcgatcagaataaacctccttcatatggttattttgagctttataaagagacaatactggctgagcacggtggctcactgccagtaatcccagcactttaggaggccaaagctggaggatcgcttgagcccaggagttggagaccagcctgggcaacatagggaatgagactcctgtctctacaaaaaatatacaaaaattagtcaggcatggtggtacgtgcctgtaatcccatctactcaggaggctaaggcaggaggatcgcttgagcccaggaggtggaggttgcagtgagccaagatcacgccattgtactccagcctgggcaacaggagtgaaaccctgtctgagagagagagagagagagaaaatactactatggtgcttataaaagttcaataaattttagctgttgttagtattattaaagtaagatctgtatgaaaataaagcagattttttcccccaaatgttcatgtcagaagtatatatttcattggcaaggggctgcttctggaaggttgagaggtatcctgggggaggggatagagcactggcaaaattggcatcacaattcaagtcacctcactcagtgttttttaagttatcaaaatccacagtatgaaaagcatttgacattacagtccactatatttatgcatttataaacaagagaaaaaatcacgaaaaatacagtaccacgtgcagtacacactgattccatctattctttttttttctttttcctcaaatgcacttgccgcctacttattccagacccaatgattgggtccctatccacagtttggaaaacactataagaaatgattgtgtcctctcactttccctctctgggatttagttttccaactataaaatgctcctgatgcccagccagcctcaccgctgctccgagtcaatgccaggaacgctgatttagcacatgctatttggagggtacccatccaggtgctgtgggagggacagagattgagaagagtgctttctgaccccacagaggccatttggaaaccctgggaatgggtgggagggttggaggtggggattgcttctcccctaagactcagcgtgatggaaaggcaatggggtgggaactaactggtgttggtctgtcccatttgtgtcccagcagccttcctgacagcgagataggagaggaccccaggtacagccttgggactgggtcagaagtgggtctcaacaaagggaaggggtagggtgggggtggaggacttgtgggtgggtaatgctgagtatggattcagggatgtgcagcctacatattttcagagacatggggctaaggcctgcattctcaatgagggcaaaatttggttcttggggacagaaaacacttagacattgcaatgctttgtggctgtccaaagtaccaaacagatgccagtatatctgtggtgctgaaatttcatggtgaatggagtcagaaaatagactagcgattgccagggtctggtgggagagagagggaagggactgccaatgtgtatgggatttgttttggggaagataaaaatgttttggaattagatagtggagatagttgcacaacctggtgaacgtacttttagtttcagaggttttctaaacctctgatttttttttaagtgacaggaaagacagaaaaaagtatatctaaaaaggctctaggggtgatcatggaaaagaaagttaagaaatatgactgtaaggaaaggagatgggtgtccctcaggccaggcagaaaattcagtcttgttgctttatgttcatgtgcaaatctaaaaaatccaagtgatatagattaatgaggctctgagtccctcaaaaccttccctccccttacctctccaaaaaacacttgagataccctagaggtggtatgaagtcaggatgggaaggttggctcagctttgcaaataagtttaagcctctggcctttgctctccaacaccaaagaggcttcactttggtatattttctctgccctttctccctccttgtccccaactgtcagtatgtgatgacaggctcagcctctgtaatggtagtgatcatatttcttgagccaaaaatcagacctcatggcatgtgacaagtttgcatatgtggatgagaacagagtggcagaatatttgacacgggagcagcttgggcagtccagggcacatggcactgcacctgacatccctggcagatcccccacattccgtggttgtcttctgatggggccatatggggctgcagatcatgcctggagccctcgcagctccagggctgcgggttcccagccccagagtgcaggtgctggtgtcagcctgcctggcctggcctggctctgtccagagcactccttgccccagctgtttgtgcagctgtatcagcctcagacctcagcctattcattccaacctgaatgcagaggctgggtctggaggagccacattgcgggcttcatactcctgatctgacaagttttccccccagagcctgcaccaatggcacctctccccattctccctcttaactgggtcctccagggccctcctcacacacccacgtggtcaggcagcagaggcttccccaagatgggcacaccccactctccacacctctctatgcagcatttgtggctacagactgggtccaggggattgtaaaggcatgctcatgttgggttggagggagctcaggatcttcctggaggatatggttcactcccatgagagctcagtatgcctttcctcccctgctgcagcccagagcgggagacagcgaccgacttggatatcaggtactgcgtcctgggaacattgccccccagggtcaactccctccagggtgctctcaggcccaagggagccacatcaccctgctgggcagcccccagaccccagccccagtgttgggggaggccagggagggcccctgtgctccaccaggtggctcgggagctgctgctgtttctgtgcatccatttactcccttcacataagatcatttttatctgggatctctttttcttttttcttcaaaaaccacatcactcaaaatgtggcttccttggctctgcttttaaaaaaaaaaaaaaaagttcttccatttggagaattacctgctgacttcaaagtccagtggcttgagggctacccaaagagggaggaagccagaagttgagtgttcccttggtttggtcacacttttgggctcctccctgactaaggaacaacagactgcagggctggggcaggctgggtgtagggcagggaggggatgaggtcctgctgccccagtcagttgagacccagacctctcaaacctgcctgggggaaggcaaggccaccagaggccacactaagcagatttctaccaactgcacctccccatccccttgcctccatctgagccatcagcttgacaactgcctctgagaacaagcccctgagaatgccttccgcaccccctactcccgccctgctttttccaggaagagaggccccgtggcctatgcttcgcagaaaccatggctgctaaatgccactgtggaggagaacatcatctttgagagtcccttcaacaaacaacggtaaaagcctgtcggagggaggcaggatgtggaggggaggaactgtctctggccagcctgccccagttccgggcccctccatcgatcacccacacccagccatctcactccccaggtgcttacctgcactccagcctctccatatggtgcacctggagaggggccaggtgtgcctgagcattggggcaatccagctcccataggggagagggcaggaatggagggaagggagagagccccgctgccttttctctagctggtgggagggctagctagctctctctgtgagtctccattcgcctggctcctgcactattttccctccaatgataatagttagggctagcatcgactgcgctcttactacataccaggcacagtgccgagctctttgtacacggaatttcctctcatgcttacaacaacctcagtaggtagatattattgttattcccactctacagatgaagaaccaagtttcagaaaggtcccaaggccacccagccagtaagtgaccaagatgggtctcaaatccaaagctgcctaacacctaagtacatgtttgtcaccaacatactctgatgcctccatgaactctggctggcacctgcccaggctaagggctggctggggaagtatgagaggaacaggctgggcaaatatttgaccagccatcatcattactgcctaaaccaaccagcagtggttttccctgcagtgccccaagcacgggttccggctgcagcttttcccactgcacagagatcatgagcgccctttcatcacttactctgcatatttgttcccaaccaattccatccttctagtatttaacctgcccaaacgctgtgtgaagtgctgacctcagctcttttcaagctcacacggtgtttgcttgcacccaagcgggaggcctattaaagccattgctcaccctgggcatagctacccagagactaatgaccctctgcaagtgctcgggccaactctgaccaggctgaccagctgcatcccctgcctctacccacgccaggtacaagatggtcattgaagcctgctctctgcagccagacatcgacatcctgccccatggagaccagacccagattggggaacgggttagtagcagcctctgaggggttttttcaaagccaggacccccaacctaccatgccctgagacactactcaggacaatgggtaactaggaaataggagacattgaaggctgaagagttgcctgcagtaaggtcaaacatgttgttcttgatgatgtcctttgacaggttttcagtcctgcttggagggcaaggtcagcttagtgccctcccaggctggggatcttcttcatttgcaccccaggtatacactgagagcccacacagcactgtgctcagcctggggttgtattgttcctgttcatcctccagatggggtcccctccacaagcttagacgaacaggattctcctgtgactgtcctccttttgtgtgattttaatccctgctgcctctgtctttgtttgtactggtcagatggtccctagcgcctacacaatgaatctttaaagacttggggctcatgctgccctcttctgaatgaattcagtaaacacgtgcaagttccttctctatgcaaggtgagaagcaggcaaagaagtggatagagccaggcctccatcccaaagagctcatagtccagtagggtacaggacagtgtctcctgaatggctgagggcatgatgtgttcctcctctttggtgacagggcatcaacctgtctggtggtcaacgccagcgaatcagtgtggcccgagccctctaccagcacgccaacgttgtcttcttggtgagtgcaagttcccttggggtcctggtctctggctgcctcccaggcctaactgcccacctccacctccccgcaaccccaccatcatccaacaatctccctctccaggagtaaatccctcctgccagagatattgccttatcatcctagtgatagggaaactgaggcaggcaaggatagcacaaatgacccattgcagacttcagatggagctctgcagtagccaatgaggagaggcaagctgtagttataggctgcctgtctgtgggacagcccaacccctcaacacttatgcagcccgactataagaatggctgataacagaatgtgtgctgccacttcccatcttatgcccagtgcagacattgctaattgttcacagcattatttcccatggaacttaactcatcctcagaatccttctcaacacagcactccaggtaaccactagccatcaaacatgagataaaactaggccaggcgcggtggctcacgcctgttattccagcactttgggaggccgaggcaggcggatcacgaggtcgggagatcgagaccatcctggccaacacggtgaaaccccgtctctactaaaaatacaaaaaattagctgggtgcggtggcgggcgcctgtagtcccagctactccggaggctgaggcaggagaatggcgtgaacccgggaggcggagcttgcagcgagccgagatcgcaccactgcactccagcctggggacaaaccgagactttgtctcaaaaaaaaaaaaaaaaaaaagaacgtattcgcaatccttacactacttcatgtcaagttctgttgtgtcaggtgccttgactgacactgaagaattctaagaaccagtccttggcctcaaagatttagaatctgattagggagacagagctcacccagttcaagaggcccagcccggttcaaatccaaactgtgcggcataaactatgagggggccttgtccagggagacaactgtgagggctggagtaatcagggagggcttcctggaggagagcctcaaagggagagtcaattaaacagaaggaaagagggaggccatttgcacagtgagttggaagaaggaagctcaagtctctgattccagctttattccctcccctctccctacaccacacgcacaagcactcctttactaaagacacttcacagtgggaagattcagtctccgttaccgtctgacacacacacagcgttttacaaagcatgggtgcattcgcgatctctcatgagatttaaacaaccctgctagagaaaagtgaagtggacattttatttcagtaaacgtttatgaagcgtctactctgtgccaggcactaaacgtttatgaagcgtctactctgtgccaggcacaggcacaagaagtctcagttcttgggagtgccataatcaggaatggacaaacaatgatcagatctggctttgcgccagtgtcacgggaatagggaggaaggaagggtaggcgtgggggtcaggacaggatgcaggaggaactggtgcttaggtgagcgaaggatgggtgggagttcacaaggcagacaaaaggcagagcagcactccaggcagaggaacagctcaggagaaggcccagacggcaggcttcctgggaacctggaatgcagagtgctgggaaagcacagatgaagcatgagtctagaagggaaagcgagaggttataaagcacctggaacaccagcccacagggtttgactttagagatgatggggagccgttgaaggtccaggagtcaggcagtgaagtgattagatctgtttgagagtgatatctgacaactgccccattttaaatgaggtaaccaaggcccagagaggttgggtgagttgtccaaagccacacagctaactagcttcagtccctagagcagagttgatagaactctaatgggttttatactcattgtcacccctccccaccatgcctttccctaccctctactctcttcctctcccttctgcccaggatgaccccttctcagctctggatatccatctgagtgaccacttaatgcaggccggcatccttgagctgctccgggacgacaagaggacagtggtcttagtgacccacaagctacagtacctgccccatgcagactgggtgagggggaacaagggggtcaggctatagggggcagggctggggaggctgtcaggcatcttggcaggaaccaatccgttgtcttggtagcaactgctgagggccacaaagcataagagaccagcactggatggctttatgcatgctgggcatttcagggagaccctgtacaggccaggggtttggtatcacctagacccacagacactccccatcctggcccgggccccccatggtacactcaaggctggcaccaagaagtctcaggaataatcaagtgctcacttctcaccttctgattcctgcccttttgatgacccatccccgcagtcatggggagtgcccatttggatggaaaagccctcttcccaccctatgaccttcccggggtggatggatgcaccaccccgggaatcatatgggaaatatggaaccaaacaatagcagtagtaatagaaacttcaggctgggcgcaggggctcacacctgtaatcccagcactttgggaggccaggacaagaggatcacttgagcccagaagtttaaggctgctgtgaaccatgatcatgccactgcactccactacagcctgggcgacagagccttgtctctgaaaatttgaaaaaggaaagaaagaaagaaagaaacttcaatattatcagtagagtccaatgttgtgaaacccctcattaactaaatttccatactcttcagtaggtagaaaataattactttttgattcattagaaagcacttaatttttaagatggagatcatgtaattttgaactctaggtcttgcctactcctatataaattctcctctaaacaacagccaaaattgaggccctctttgagcttcaggctggtgccaaatggctctgcttattttccccaaaataaatcttccttccatgtatgatgagaccccctccagtataaagaagacccaaagaaaatcacccaaagaaaaaaggcccaaagataagacccaaagacctaaagatttaaatatatatacagatacagaaggtttgtttctgagtttctgtagtgaccttggcaataccttgtagttcaggacaatcctgaggaacacagaagtgctggcttccttgaggaatcagtgatcaggactctcgagccccttgaaccccagcatagggcgggagggggtgagggcagcaggggtgggtgtctgaattaatgtcaggtctacgtgatggtgtcatcaagtgttccagataaaaagttttattgagccgggcgcggtggctaatgcctgtaatcccagcaccttgggaggccaaggcgggtggattgcttgagcccaggagttcgagaccagcttggggcaacatggtgaaaccctatctctataaaaaaaaaaaaaaaaattagccaggtatggtggcgtgcacctgtggtcccagctactcaggaggctgaggcaggaggatggcttgagccaggaagcagagattgcagtgagctgagatggtgccattgcaccccagcctaggcaacagagtgagaccctgtctcaaaaaaaaaaaaaaaaaaagatttattgattccaaagaggcatggccacacacacttagaccagcaggtgctttgctaagccctgatggaggctgccagacccgccgtcaagaggagctaagggtagtgtacaatgagcccacttagtgtatgacggccgctgccgtgggtggagtccttgtgagtaaccagccagcttgagcaggatgcactaatttgctctgcaaacccagccattgagaaatacgcctcagatgtaccgaactctaggtcctaggagtatgttggttggggtaggttatcaataccagcccacttgcagtggatgagctggtggccatttgtagtgaggaaagggatgtgtcaacctccatcttagactccacaattgagggatgtgaccaccattcctccccagccagcccccaaaccacgtttgttgctgcctttccagatcattgccatgaaggatggcaccatccagagggagggtaccctcaaggacttccagaggtctgaatgccagctctttgagcactggaagaccctcatgaaccgacaggaccaagagctggagaaggtgggtatatccagggatggccaagcagccacccctggatgcaaaggttctgctagaacctgaactcataaaggtcttcctgtccttagtgccccaggaagccccctaaagggcagatgtgggagctgggcatgaactggctcctaccagaggagagacagtacctgtgccaggtgcccagggcagaatcaggtgggcaccttcgccttatcctgaggtagtcagatactatttagttgcaaagtttcagaaaatcaactcaaactggcaaagaaaactaagcaaagaaaacaagagggaattaaggatttattgacccatgaaaccaaaaagtccaggtgtgtcatagctttaagtgtgctggatccaggtagtcagtgtaatcagaaatctgtttctcccatctcttgactctgctcccctcaaattggctcagctcccctcaaattggctccattctcatggtatcagtgagggccaccagcagtcttaggtttacattctcccagctcaacaactctgccagaaaaaaagtgcctctttccccatagttcagcaaaagtcccagggctgagtctcactggtccagtttggtcatgtgcccacccctgaacaaatcactgtggccagcggtgtggaatgtgaggattggcctgtcctgggtcacgtgccactttgggagccagatccacctgaatcacagagactaaaaacaggggaagagtggttccccacagggatatgggggtgctattatctgatgaaggggaaggactaaatcctggcaagatgaatgtgtgtctgtctgcccctccctcaggcagggacaaagtagaaatctgacattggtcatcaccagagtagttaccccttaacttccccttcccccaccaaccatatatcctgaagacattgcccaggccacatctgtcttttaggagactgtcacagagagaaaagccacagagccaccccagggcctatctcgtgccatgtcctcgagggatggccttctgcaggatgaggaagaggaggaaggtacaggcaatgggactgggagtgaaattatggcctgaggtctgatcagccacagagaggctaaggtttggggttctgggtgtggtgcagtagtgtgcctttgattaaatggcttccctctgtgtgcccccgttgtcccctcagtaagtggggataaaatgccctgattcaccctcagagggatggaaatgtgtagccacagagtgggttcttgcggcctgcagaggaggcagctgagagcgaggaggatgacaacctgtcgtccatgctgcaccagcgtgctgagatcccatggcgagcctgcgccaagtacctgtcctccgccggcatcctgctcctgtcgttgctggtcttctcacagctgctcaagcacatggtcctggtggccatcgactactggctggccaagtggaccgacagcgccctgaccctgacccctgcagccaggaactgctccctcagccaggtgtgactggcggcccatggcagaggttgggagtggggatgggggaagggctgagcccatgggcaccctggaactccaaatcactctctgcctgtgaaggagtgcaccctcgaccagactgtctatgccatggtgttcacggtgctctgcagcctgggcattgtgctgtgcctcgtcacgtctgtcactgtggagtggacagggctgaaggtggccaagagactgcaccgcagcctgctaaaccggatcatcctagcccccatgaggtacccgtctcccctggccaggctgggactgtgagcaagtcactgttctctgagccttagtcttcccatctataaaatggggatatacaacctgtcacaagcttgtgggggtgactcaaggagacagtgtgtgtaaaagtgccctccttgtgcaagaagcagggagaaactggcatttactcagccagatactgtgataggcattgtgtgtggttagctcatttaattgttaccatggccctttaaagtgagcgtctgcacatccaagtaaagattgttttctcctccctaagtgggtgtaatttgcccatccccacccatgagttcagctccctgccctcccctcactctctctccctcagccagcctcaggttttgacactgggggaacaggtagctgttctattaataatttcctgtaatgggatggataaaaatctcaaaggccacttgatgtcaaagaggtttaaagttgtccctgcccaattggttggccaacttggcttaaaaacacaacaggcaaacagattttctggccccttgtcgaggctagacctcacaatctaactgcactttttactttccagcctcatgagttttctgtggcccacagatatggcctccaagtttatttacttttactctctatttgccccagctctgtagttctgaaactccctggttggggttgggctgactctgggtcagccagccggcaggctgtccccagggccctgttcctcttggcaggttgtccctctggagaggactctgtgtcccaggaggacagctgctgagtcaggccgagccggcagctgagaaaggcggcagtcgtcagatgggcttgagaaactgaaaggctaacgaaaggccagcgcccctttgggcagctgcaggaattcacggggatacaggccagatgtctacaaattggcagaggatgccagacccatgaatgactccagagacacttacatgaaataattaactatctcattcagtaaacaggaagtaaatcaatggacaaatgagtaactcttcctctggctgcctcttaggttttttgagaccacgccccttgggagcatcctgaacagattttcatctgactgtaacaccatcgaccaggtacagaggaccgtgccacactatccccccttccagagacacctcggacccctgggggcttctcctgtctgaggctgggttccccagatcaggtgatcacagccctctgggaagaagccagtgtccccgatccgattataatgctgcttcagggctggggcctccctcgtgggagcctcacagtaaggctgagggaaaccagatccctttagcttccacctgagatcccactggctttctctagtaaagttccagcatattctgaaccaaggtggctgattgtatggagaatattcattttgattcagcctgtgttctttatttaccattgtaccagatggtgtgaaaacaaaatcttgattcctacctcagggagtttaccttgtagctggagagatgagatacgtgcctataataaagggagagcaaggccgggctcagtggctcactcctgtaaccccagcactttgggaggcggaggcaggcggatcacttgaggccaggtgttcaagaccagcctgatggccaacatgatgaaaccccttctctattaaaaatacaaaaattagccaggtgtggtggcaggtgcctgtaatcccaactacttgggaagctgaggcaggagaatcatttgaacccaaggggcagaggctgccgtgaaccgagattacgctgctgcactcaagtctgggcaacagtgagactcagtctcaaaaaaataaaggatcaaaaaataaagtgagagcaaaacatggcggccagtagcactctaaacacagtcaataccaaaattcacctcactctctccccctcgtctccctcagcacatcccatccacgctggagtgcctgagccgctccaccctgctctgtgtctcagccctggccgtcatctcctatgtcacacctgtgttcctcgtggccctcttgcccctggccatcgtgtgctacttcatccagaagtacttccgggtggcgtccaggtgatggcctcaggggtgaggggtgggaggtgctttgcaatgtgcagtttggtgtacttgctagactcatcgttatgagagtaatagggtcgtgttccctccaaaaaataaaaacaaaaaacagaaatgaaggaaatagaaatatccacatcttattccaccgccctaatataatagtctgccaacacacgcacacactgaggttgacatctgaattatttccttgggcgatatggtcaggactggaattgctaggtcatgataaatgcacattttatgcccttcattcattttgccaacatgcttcccaggagggttgcatcattctagtggtcaggctgattgctgatgcatgaaatcggcgggcacctgattcaagcagtgttatgataacacctcccagcccacgtgagtccagagtgtagctgtaagccttgacttgagggagcctctcacagccattctcatggatcacatttgccctcatgagctttggatccatgcacgcctctttcctcctcaaaattttctaagaatgttctctagggagttctttctgggagtgattctcccagattcatagaaactcatagattcaaaaaattgtaggaaaaaatttaaagaacgtctaggccagtgtttctcaaactgccaattacagcccatcagtgggtcatgaaatcaatatcatggatcacaaccagcatttttttaaaaatgaaaaaaacatcagactgtattcatagagtaaagcaagctttgcttcatgaaacctttgtgttggtcatggaggtgtgtgagtactgatttgtgagataaaatatatttctgactgcaggttgtggtcagaaaggttaagtacctttcccaagtgcacatagttggctagaaactagagttgagatacttattagcaataataaaatttagatgcattttggacacaattacctgccccaaaggatcaacatttgtataaatggctttttgcttggatgatccagaatggcccgacacccacacgaacaacatagctttttgacactcaaaaaattcaaagtgctgcacaagctgttctacaaagttcatttcttctgccagagaaacagcccagtctctgtggcacccagtctgaccctggagatggtttatcagggaaatcaacttcctgcatcccaaactggcctccctggcactgatgtgcttgtcgaggtgcagctttggggagcaggaggcaattctgttgccatggaaacctctggccttaccccgagacgaaacctatcatttcagcacatcactggccagggtctaaagagctccttgatggggtaagcggaagacggggttgaacgctttgagtttggtcttctgttcctttggccagctgtctcaaggttcagattgttcacctgtaaaatggaactagcactgcctgcccagccttagctcagctccaggctgtgcagcagaagtacagggacagatggcgacctggggttgacaatgcccaggacagcagtaattgtgccccacatcaggctgtgtctaagcattgtacataaacgatctcattcagtgctcacaaaagctcaatgggctggtggcattgtcttcccccttcacggggtaagaagctgaggcctagagaggtaaggccattcacccacacagcggtagcaggtggagctaggcttcaggcccaggccgagccctgagcctgccctcttaactgttccactctgttccccgccacagggacctgcagcagctggatgacaccacccagcttccacttctctcacactttgccgaaaccgtagaaggactcaccaccatccgggccttcaggtacgagtccacattcccccaaggtaggagtggaacaggggtggggccagggggcacaggccatgagatttgattctcaggactccacttgggaaggccaaggacacgttctctctcaagctgcctcaggtcccaaggcccaagggatatccaccagcagggacaggccaggtgggctcccactgaatgttctagagaggaaaattccagctctgtagacaagcccaggacctctgtgaggcagagcatgaaaagagacaaagctgggacaagtcttcatgtatcaacgctagaaagggccttaggtgcgggccaccctaagcccttcttttattaaggagcccctgtgtgccaaacactatgctgagtactgtacaggccaatcccactcattctgcactgcaaccctcggtgctgagaatggtcatttccattgcacagacaaggaaactgaggcacagagacgttctataacctctctgtgtaaggtgccacaaagcccagacttgaacctatttgttcatgcaacaaacatttactaagccccgactatgtgctaagccccatgccaggcactaaaaagatgagtcaaataagccgctgccctgcaggcgtttacagcccagactttgagcaggccaggataaatccacgtgacaagtattctgaaaaaagcggattcaagggctgtgggagcatagaagagagacagtccgggaaggtttttgtaccagaggtgtcatcagaactaggactcaaaggaggggcaggagttcaccaggctgaggaattcctgaaaacttcagtgcccctgccatcgtctcactaccctgagtggtgatgttggggtggacaggagcatctgaggttgcctggggaatgagggaagctgttgtttcccactccccaagagtctgtctgatctccagaggcatctctcttccagtcaggcaggccagagacccctgacacacaaagttgggctcttttctcatcttcatccagagagtgataataggttatttttagggtggcacagctgcacgaagtatgacagtaaccatgagacaccaagcactgtgtccaggagtaaccatagggcacaaggaccagccaagggccagagaggcttacatctcctccccccaacccctgaagtccagcttcagccctggagaggtatccaggcccctctgcccaccctggagcacctagggccagtggaaatccacctcttagggatcttgtctaagtaaagaagagcagagcaaagctctgccctggccttggcgctgctccctggacatcccttgcccctggacaagcctatgctgtgtcttccacaaagaagcttgctggggactggattatgactctagagtctcctcccagcctcctcttctcaagcctgaacttctcccgttccttcaacttccaggtccctcgacattactgagcctagcctttgctctaagttttggtgatttccctctctcaattggtgtctcagagggccctggggtagagagatggtgactcttctagagtgggccacagccccttgtgtgcagatcccagcttcctgtaaacagcctcagatcaggccaaacctgtggtcagccagagccactgctacccagtgaggtcttccacaccctactgacacggtgaatgatttttaaatttgaatgaaaggctttttaatcaaccccatacacatttaatgcattggctttaatccagcagcctgttgagagctattagcacttattgattgcccacttactgtatgccaggcaccgtgctaagtgttgtatgtgcattattacatttaatcctcacaaggaccacataacataggtacgaatcgccacattctccagatgcagaagcgagacccagagaggctgggtaatcaatccaaggtcacacagactgcgggggctggcgctgagcttggaacccaggtttgcctgaccttctgggctttcctaagagatcttattttttcccaaaagagtttcaagagtgcccagcactgggctcagtggcgggctcggaggttgttttcgttcatgtaggaactatcacttccccatttttttcataagaaaactgagtctcagtcctgatacacagccaggaagttgtgatgttcaggctccaacctgggtttacatggctccgaggctggggctcttttctagtcctcagacacactgtcgcacgcctgtggcagaagctcccatctcacacttgccgaccctcaactcacacagtcctgagacccacatacgctgagcgcctcacactcctataacacgcacatgccctgatgcacacacattttcaacacgcacttactctacccttcaggcatggtttcacactcactgcagacacgtcaccctcccacacgtctccaccctgggggtgtgcagtagcatgctctctcccacctcagaacctcccttcagtcccctcagacacatgccctctctccacgcagagacaatcaaagctgaactaacaccttccagggtgaaaagcaaatgcccagtaaggtacgtcttgggtgcctccgtgtcccctgagtttggtcctatcaaaccagcgatgatgaggcagcttttctttcgttccttcctccatcatcaaacaagtgctcctgcatctcctctgggccgggcctacgtcagcaaggtctgagggaagcggccaaggagagtgatgacggcagcccaggttgatcagagaaaggaggcaggtccatgcgcagtaactcagggaaaacatgatgaggacctaaggatgagaaagaagcctccagagttccctgtgcagagagattccatcaatttcagagggtcaggggagtgccatgcattcatccaacaaatatttattgatagtgccaggtgctggggtatattggtgaataaaacatcttcatggaatttgcagtctattgagggagatgattataaatagctagagaaatgcatgtacagcagatactgtggagcaaacaggttgcagacaataataggggaaacctactttatagtaaggtagtagccaggaagagcctctctgaggaggcagcatttaaggcaagccctgaaggttgagttgagccagccttatgaagagcaagggcaaaagccttccaggaaaagggaatagtgtgtgcaaaggccctggggtagggaagactttagtattgtcacagagcttttaaaaagctgagtggctgcagcatagtgtgtggggtgtttgtggcaggaattaggttggcaggagggggttcttcatcctataagcagtggaaggtcattaatattcttttttatttgtttttttttttttttttttttttttttttgaggcagagtctcactttgtcacccaggctggagtgcagtgaggtgatcttggctcactgcaacctccacctcccgggttcaagcaattatcctggcttcctcagcctcccaagtagctgggattacaggtgtgcaccaccatgcccagctactaatttttgtattattagtagagacagaattccaccatgttggccaggctggtcttgaactcttgacctcaggtgatccgcccgcctcagcctcccaaagtgctgggattacaggggtgagtcaccgcatccggccggagatcattaatattctaaacagtgggggagaggacacagtttgcgatttagatagattaagccagccactgtgtggagcatggactgtagggagacagcaggtagacgtattcaggaagctgatgcagtagtccaggtgagagtttgtggtgggcaggaagcaggatagagggggagggaggcaaggactcttttagagagagacataagaggacttgccaaggggctgaatgtgaatccaggtgattcctgggtgagaaactgggtaaagggaggtgccccttattataatgggaaagacctagagaaaatggatcttggggtgaaaacaagagtttggaggaggtggggattctggacaggtttgaataagcagaaaggagtggggtggacattccagagagggatagcttacatgaagtggccacggtggcatgtctggggactggaggggccctggagcctccctctgcaggtagggagactcctaggagctatgtggaccaacactgttcccttaggagcttctcatcctccctccaggtatgaggcccggttccagcagaagcttctcgaatacacagactccaacaacattgcttccctcttcctcacagctgccaacagatggctggaagtccgaatggcaagtgctattcccctctaccctggcctctgataggagggtggggccagagcaagagcacacaggtacctggggatgaaagagaggataggataccagatcgtgtggacaccaagccttcctgcttcccccagccctggtggtcctcctagtgtctagcctgtgctccttttccccatatcactgcctggaggcttgtgtatctgaggtgtgtgccagtggcaagaacagttgtggtgaatgtgtatctgcagtgggtcatatgacacccacattgtgtgtgtttgtgggccagctgaggcgtgcatgttaaagggtgtgcaggggctagggggtaggggagcatgagcttgtgggacatgttggctcctggggctccagccttcgcagcccttgtgtgtgtctggtgacgtgtgcatgagttgcagggctggagtggaggcctggctgagctgctctctgccccgaaaaggagtgaggtagaacaggggcctgtggctctaacccctgagcgcccaggtcagctcctctccctccccaggagtacatcggtgcatgtgtggtgctcatcgcagcggtgacctccatctccaactccctgcacagggagctctctgctggcctggtgggcctgggccttacctacgccctaatggtgagcggcagtgggctagggcagaggaggggtcagacaccagcactcccggagcaccttcgtcactggagacatgagacactcccaggccttaccccaatttcatttgcatctgatgccagagggacagtgcgggcaggaaggctgaccagcaggccccagggcccaggccccagacaggtggaggttggggagccacatgactgaccctccctgtgcctccagggagggctgctctgagcaggcagtggatggcagcaaaaggaatctggggccctggcccctctccagccttaagaagagccattctggtggctgaggacagaactaagcgaccatggagtgtgcgccactggcttgctccccacaggtctccaactacctcaactggatggtgaggaacctggcagacatggagctccagctgggggctgtgaagcgcatccatgggctcctgaaaaccgaggcagagagctacgaggggctcctgggtgagaggctcagggagaggggtggggaagagtccaag

SEQ ID NO: 15318 - DNA, 68446 bp, Homo sapiens
gacggccgggccgggcggcggagctgcaagggacagaggcgcggcaggcgcgcggagccagcggagccagctgagcccgagcccagcccgcgcccgcgccgccatgcccctggccttctgcggcagcgagaaccactcggccgcctaccgggtggaccagggggtcctcaacaacggctgctttgtggacgcgctcaacgtggtgccgcacgtcttcctactcttcatcaccttccccatcctcttcattggtgagtgcgcgcagcgagccgcggaggaggggacgggagagcagggagggaggaggaggcgctgcgcgccgcaccgctcggcgtccccttccggcccgcgaccgccgtccgcctcgttcccggggtcccctgccctgtgtcctgcccgccggtccccgcactcgcacaccagctcatcccttcactcccccggtgcccccgatcccgcgccaaacacagcggacgtttgtgacccatgggatcaccaagttttgcttctgcagggccaagagctgggatggggaaaagggaaagaggaggtctcagcacgcagtgggaaactggagaggggtcgggcctcaccctccgtggcgcagcttagggagccgggtcacccctcccgcaaggcagcctccctgtcagccgcagctgggcctagggaagagggaagcctgtgctttggagtctgggatggaggcccagctaacccctatgctttcaccgggctgagccgcgcagtggtccgtgatctctgacagtcccaggcccgcgccctgggcgaggagaggcgagagctagggacttggattcccttcccccgccaccccacccgggcatgtgtctccagagcgcaacttctcaggctctgcgcaaagtagctccgactcgccgacgcagcgaccccggcgcccttgcttgcaaagttgggcgccacggccgggacaatcgtgcgtgcctctccactgaggtcccccccatctctctccaagaccttgactcttccagaccagtcaagtctatcaactcatagggtgtcccctgcatccccaaaacgtgttcattcactttaagaaaacaagcaaatcttaaaattcatatacagctttggggaagaaaggaaagattgtcacaaaattagatttacaagaggttgctgcagaagcagagttgctagttattaacaaagacagttagatagaaatagaaataaaacatacaaaatatgtgctcatatgtgcatcaaaaatcaaaaaagaacagcatttacacttctgttctcagccaaacggtttattaacctgatgacttgtcacacaagaagttagtatgtataatggggtaccttggcagggcacagtggcttacatctgtaatctcagcattttggtgggctgtgacaggaagactgcttgagtccaggagttcgagaccagcctgggcaacatagtgagaccccccccgccctttctacaaaaaattaaaaattagctgagcatggtgatgtgcgcctgtagtcccagctactcaggaggctgaggcgggaggatcacttgagcctaggagatcaaggctgtagtgagccgtgatcgtggcactgcactccagcagaggcaacagagcaagaccctgtctcagtaaaaaggtgtggtgggggaggtaccagcataggaccaggctgaatgagttggacgtttagtttgtgtgtaccagccttggggatcctcatgtgtaggtgtcaccctcaccatggacccaatgcccaagcacctttctggggttcatgcaccctcttcctcctccaagtgggcaggcatcctgcctctgactgtctctccctgcaggatggggaagtcagagctccaaggtgcacatccaccacagcacatggcttcatttccctgggcacaacctgcggtggatcctgaccttcatgctgctcttcgtcctggtgtgtgagattgcagagggcatcctgtctgatgggtgagtgactgtctgaggactcaggaaagtgaatctgctccagggtacttcctgaaaggcccaaggagatcctagctcacctatattccacaagcccatgtcttttgttactacatccagcagctcagtgtcttctatgtgccaacctctctgagctgggcactggacgcaagtgagtcccaggccctgccatcagtccaggagagcagagggaacacggacctgcatgccaagtcccagtgaaataatgctagagcctattagaatgccacaactccagtgaaaaatgtctggcctcttctacaacctgccggagttaccttcttggaaaaaaaaaaaaatctaaccatgccacccactcttgcataagacctttccttggttctcagctgttttgaagatgtggtctcagatcctcagcccaccattcaaggtcttcacagtcagccccacctatctctggcctcattccccatgcccaccttccgtttgggcctcacagcacactcctcacacctctgctacagcacagatcacactgtatgttaaagtttatgtctatttgcaaaactgtcttcagagtcagaaaggcctaagagttagaatctgagtcttgttcatctttgtgttcacagtgcaaggcatgtgataaacataaacattattcagtccataaacatttattgggtccttaggagaatgaatgaaaccatgttacaaataagtactctgggaggtgagaggaaggcagaattgggcaagctccatggttgagagggctttggagcggagtctggaagggtgactaggcttcagacacacagaggaggaaggagagagagaactggtggtgcctgagggaagggaaaaggcaccaaagagaaaagcaggtagggctagggagcagcgcaggggctggagcattaaacacaggctggggagcgatggaggctgaggctgggaacccaggttggggcatctcaggaggactgtgaatcccagcctgcatgtttgggtcggatttggtcagcagtttggaacagaagagagatgtcatcagcataacacttttaggtgggaacctgaggtgttcagcgcaggctggaggcagggagaatctagaggtataatagaagcaggacttagcattgactgcagtagtctaggtgagcaataactgcagacagaaatggtgtgtcagcagtcagggacagaagaggagcgggagcagccatctcactaaggaagaatccagtaaccagcaaggatgagagactgccaggagagggagtggtggaggagagggatatttggcttgagtatctgaggtccagcgccccctgagctggaatcagattatacccagactgcactcctgcagtgctgcctggctcctgtagttggatggcaggggataggctccctcatcctccctcccgttccccaccttcccttccccaatgtccctgcatcctggcttcagcagtgatctctaaaatacctgcttgacttggaggcagcagctctgcctgcttattaaagtccctagaccagcaagaagaccagaaggcatactgctacacaagcacgtgacaagtccgcctccacccccacccctacaccccttccaaagtagcacaaatgccacagtgagccctcagatgggaaatactcaccagatggtgacagagaaagacacctccgcccttggagaaggaagacctgggtcttcagtgagcactgctgctgtgtaccagctatgggactttgcacaagtcattcaggctttctgggcctcataagcatttataaacatacgataaaacattttagttgccaacttaaaaatgtgtgagaaagtataaggtgtttcaaaattatttcaaggagtaaagaggcaagagttttgaagatccctgggcagggtgttggctgttcccagtgtggccattcatgactgctctctggccttatgaaacaagcatcatagtccctggcttgcctgcttcatggggctgtggagggtgaaattcgagcatggacagggtgcagagcccggagtggcagagcactgggtagactgtgtattcccagaatgtgggaaactggaatgaatcggtccagggatgccctcctgctggctgtcagcagcccctcctgtgtgtggctgtactgcttcagctcagtgcaaagggccatctcctccccagggcacagatcagctcaagctgagtaattgtcatctggtctttgtgagctcctacccccaggcctgagtgaggggcaggaaaagagcagacaggagaagtcacagacccttgtgatacctccagtctaatccagcctgggttttcagagctgtctggaaatttagggggcaggtgggagggggctgattaaggcagccctgatttgatttagagtgagcctcatttagtgactaattaagccatcttaaacctgtagggcttcccctcttcctttgggtattatttctttctgtgatgttctgaattcagaacaatcaaaacagtataagttagtgaagaagatattttttaataactacaatattttcccagaccaccatacactggataaagcctgtatataaaactttacctaatttcttaactaattgaatgtgtattatttaacaaagcagctaaaaactattctatgaagccatgtcatgaaatatttagttcaattatggttaatcctcatcttatttcgtcttataaaattttaacatttctacctcctattgcaaaaaaaagcatttatatcagcatataataaaacatgtctagatgtcagcttaaaaatgtgtgagagagtagagggtgtttcaaaattatttcaaggagtaaagaggcaagagttttgaagatccccaggaagggtgttggctgtgcccagtgttgccattcatgactgctctctggccttgtctgtcttgtaccttctatattagtttgaagaccttttttggagaatattcactaaagaatatcaatatctaccatttcattaaaaaagaaatgtggagtttgccttttcaagttggtttgatgcttattgatgttttcagggacccagcctcttcccatctttccataccatcctgtgtgtgtgtgtcagcctatcttccccatggtcacaaggtggctgcctagctccgggtattgcttagcatgagcagagagggcatgctgccgacatgcctctcctttatgacagagatcattctttctttgacatctcactggccagaatacgtggaccaacactggcaaaggagtatggaattgcatggctgcttaaaccaatcaccatccattccctggggctgggtatattgctgctggagcaaacctgtggtcctcctggcacagaataaggggaagatactctttggtggacagcccacattgcctctacacttgcacctcagtcccaccagacccactgaggtcacaggatagctctcctcatgtccttcctccttctctgttgaactcttatgtatccttcaaagtccagcctggtgccacctcctctgggaagctgtccttggttgcccaccccctcctttgtgctctctcagtctctgtccatcggcagtatcacttccctagcctgctgactccaacagttagctctgagcatggcagccccctccataccatcagcttctcaagggcagggacccttggcacactggatagaagtagcctggtgggcaacagcagcactgaggcagcaagctgtagcaggccatctgggaatggagtgggtaccacagggctggagcagaaagggcaggctgggcagatctgataaagtggctggaggccacatagcctgggcctttcgttccaggctgagcagagtgggttttgctgtctgcaggagggagctgtggaagggcatgatcacgaccaactaaggtgaccctcctcaccaggcccagggaagactgaggcctggaaggaggctctggctgcctctgggtcttacccccaggccacagtccacccacttagaggcctctgtgagttaaggtggagagactatgagctggtattgactgctccattccccatcccgagagaggagacaaaatcagtgaccttggaaatgcctcttcgtgcctcagtttcctcaccccataaaatgggagactaagagtacccactcgatggggtttaatgaagattaaatgggttaacatatatcgcatgcttagaacagtgcctggcacagagtaaatgctccataaatactgactctcatcagtttgttatcacagcctctggggagggcgccagtgctgacttatgctgttcgtgttaaatggggctgtcactgggtgagttgtggcatacaggcccctgcactgttcaagagaccccagcaacccttgtgcttagggctcagcacatagtaaggcctccagatcatatacccagctctactccatgtactggcagctctgcccagcccataccccaaatacgcccattaactaaagggccctgcagcctataaagtgatgctataaaggttcagtgttcagcctttgaaattcaaggcctgggctgctctattgcagtacttagcatgtccccatcctgtctgtttctctctcccatctcagggtgaccgaatcccaccatctgcacctgtacatgccagccgggatggcgttcatggctgctgtcacctccgtggtctactatcacaacatcgagacttccaacttccccaagctgctaattggtaggtgaggtgtaggagggaggggcagtaccttcattcatttcttcagataatgtttactgaggactcattatgtgccagctattgctctaaacagtagagatttggaatagaaaaagaaaaaaatccctgccttcatggagcttacagtctggtgaaggaggatagacaggcaaagacagtgaataaacaagcaaacaaataggtggtggggatgctatgaagaaaatcaagctgagtaaggggtaggggcaatgacaatgttgctatctacacaggatggtcagggaagggctgtggtaactgtgggcatgcagatatttgggggaaggtattccctgcaaggggagtgacaagtgcaaagtcctctgatagggatagatttggcaaagatgtcactgtgggcaaagccaaatgagcaaggggaagagtgggaggtgagggcaggcgtcaggagaggagcgagcaagagtcccaggctctgggcctgagagcctgggtgaactgtggcatcaataactgatgtgacagaggagggggaggtgggctgtggtggggataaagttttctactgggggcatatcgagtttgagatgtcacagagacagccaactcaagtgtcaagttgggctttcatggggaggtcaggacaggagctacactttcaggaggtgggccttgtagatgacatctaaagcttgagcctggggctggctgccgtggctcacacctgtaaccccagcactttgggaggccgaggtgggcggatcacccgaggtcaggagtttgagaccagcctgaccaacatggagaaacccccacctctactaaaaatagaaaaattagctgggcatggtggcacgcatcggtggtcccaggtactcaggaggctgaggcagtcaaatctcttgaacccaggaggtggagattgtagtgagctgagatcgcgccactgcagtccagcctgggtgacagagcaagactccatctagaaggaaggaaggaaggaaggaaggagggagggagggaagggagggagggaggagggagggagaagaaagcttgagcctggatgaggtcacctggggagagaagagaaaggctctgggaccagagcttgaggtttgctaacatttagagagactcgggaaggactgcccacttagagcttctgagatgttaaatactgcaggactggggtcccaggcagaagcaacaggatgatggttggtgtttactgagcatgtgccatggggcaggctccatgccatgttccttacattcattgtcccacaggctaattcccccagcctccttattggtattgttaatatccccattttccagtgtggaccctgaaactgagaggttaaaaataataacagtaaatactcactttgtacttactgtatgccaggccccatcctacctatgtgatatattaattcatttaatccttgcaacaactctatgaggtaggtaccattattattttccctttacatatcagaaaactgaggctcagaggttaaataactggcactagtctagctcgtcaaggggcacagccgggagtctagcatctgtgcaatctcctaatcatttctgagactgcgtgtctaagggccctcagacttcgtccttggggtaaaggtatcaatccgcaggtctgcctctgtgttggggttcagcctgtgtgtctaaggctggggctgtacatctggcagttagactttgttcacactatgtccttaagtcagactgatttttaggtatcacagcatcgaattgacatttggagtctggcacactctgtgctaagccagtgacatcatggtgttgtcagggagtacagggtgtttcttgcactagtcacaggtctgcctttctgtagaaggtgggatctgagctccattaggattatccaggtgatccccctacccctagcccaggggcccccacatgagtatgaatgggagctgggggaagcaggttgagaggggagatgttaaatacaggcttcagagagccaccctgcttccatttctgaagtagctccttgtctgtagagaacccttcattaaccagggcctggctgaccagtgtcctctggaaacaccctgtctggacatctgaggagttcattttctcattctccagcaaacacataatgttctctctttaaagcacaagttatcacccgtggatggatttgtccttttctaaggaacaaagactaactccctccattccccttgttggagttatctccccttgaaaggacactccacagagccagaaattctagaacagggaaaagtggaggggacgtgcctgtgaactgcagggacagaaggaaatgggtattgggagaatggccagccctccaaggggctgatgtctggcctgggtatggagtcccacagaaaggggacctgtgatgcagcttacattgtcccgtgagggaaccatgatcctggaacccagatgaggccaaggaaatgttctctgaaaaagtcatatttgagctgagaactgaaggaactaactgggagaagggaggaaagagtgcttcaggcagaggaaacagcatgtgcaaaggccccaaggcagaaggaacaaaacacattagaaaattcagaagaagaagagtggcgtgggtgcaaagtggaggggagctggactttgggttttgtttgcttgtgcccaggctggagtgcagtggcaccaccttgggtcactacaacctccgcttcctgggttcaagcggattcttgtgcctcagcctgctgagtagctgggaatacaggcgtgtaccaccacactcagataattttttgtatttttagaagagttgggatttcaccctgttgaccatgctggtcttgaactcctggccttaagtgatcaggtctcaacttcccaaagtgttgggattacagccgtgagccaccgcacccacctggaaggtcataccacagatgtttgcctttatcccaacagcaatgggaagttgtgtgtgtgtgtgtgtgtgtgtgtgtgtgtgtgtgtgtgtgtggtttaacatgtttaacataaaatttatcatcttaactgtttttaagtatagtgttctgtggcattaagtatattcacagccgggcatggtggctcatgcctgtaatcccagcaccttggcaggccaaggcaggtgaattgcttgagctcagaagttcgagaccagcctggccaacatgccaaaaccccgtctctacaaaaaacataaaaattagctgggcgtggtaatgtacacctgtagttccagctacttgggaggctgaggtgggagtatcatgggaggctgaggagagaggatcagttgagcctggaaagtggaggctacagtgagccaagattgtgccactgcactccagccaagattgtgccactgcactccagcctggacaacagagtgagaccctgtctcaaaaaaagaaaaaaaaagtatattcacagtgctgtgtagccatcaccactatccatctccagaactttttcatcttcccaggttgaaactctgtactcattaaatgataactccccatttctccctccttacagcccctgacgaccaccattctactttctatctatgaatttgagcactctaggtacctcatctaagcggcatcatgcactgtctttttttttttttttttttttgagatggagtcttgctctgttgcccaggttggagtgcagtggtgcaatctcggctcaccgcaacctctgcttctctggttcaagcgattctcctgcctcagcctcctgagtaactgggactataggtacctgccaccacgcctggctaatttttgtatttttagtagagacggggtttcaccatattggctaggctggtctcaaactcctgatcttgtgatctgcccacctcggcctcccaaagtgctcggattacaggcgagagccaccttgcctggcctatttgtctttttatgacttgcttatttcactgagcataatgtcctcaaggttcatccatgttgtagcatgtattgaaatttccttcctttttaaggctaatattctactgtatggatatgccacattttgtttatctattcgtctgtcagtgggttgcttccacctcttgactcttgtaaatagcactgctatgaacatgggtgcattgaggggttttcgacataatcataataattgctttatggagaccagcttggaggagaacaagatggggaggaagtgtggaaaccaatgagaaggctctcagggtatagcgggaatacagaggacgcatgatgatgcctggacttaggtggtaccacagggatggagagaagtagatagagtcaagctatttaggacgtgaaatagacagcatttgttaatgggagaggtgtggggcgagggagaagaatagagggagaaggaggagtaatgggagctcaccagcagcccccatgttatgcctctttccttccttttccctcttctctcatcaggcattcagcttttgctgagtacttctgtgtctgacaacaggctgagcactcagcactgcaggacaggactatgcaaaaaacctctgggcctagtcctgggtgcactgctaattccctgtgtgaccttgcacaagacatccaagctctctgagcctcggattccccacctgggcaggaagagtaagtccctgcctaagtcatagggttgtaatgaagagcaaagcagaccatatctgttaagtgttagggacaagacaagcatgaggcatattttcaagtctcggctcctgtaggcagctctcactaagggctaaagggcttctgatgcctgggatagaatctgtccggcagagtggagtggaggcagggggacagccttcagctgtggaattcctccagtcctagagaccagcctgagctgggggacattattccagtcctgaggcatgagagcagaaggccgatgcttctgccctccatcctaatgtcctcctgcagggacccaaggtggatggcatcgatccccccgggtgagctcagccctgggcgcatggtggggcccaacatctcaacctgtttcctaaccctgagccaggcaggacagatcccagatttgtgcccaagagatgctctggcatccatgcccaggcccacatagggatagagggcagggtgaaagtctctctccctcactcgggtcctctggagaggggctctgtgtcatgaagctgaccttatccgcatctggtctaggagggaggagggaaggagctgccagtgctaaaatctcccccaccctcaaagggggacttcacaggttattgctggttttggttgttggaagctgacagtgatttattggcagattgaagtgagtgtgtgtgcgagaatttaggatagaatctactgatagcttctgaggtttaccttccccaggtcttaaatctggagataataaaaatataacagctaatgtccaaagagcacccgctgcgtgtgaggctcactgcactaaatgctttccatatgtttctcacaagaaccttctaggtagcactattatgattcccacttaatggatgaggaaactaagctctagaaggctaagtgactaatccaaggtcacacagctattatgtcacaggctctgagcccaggtgtatctggctgcggagccaccaccactaacccctgtataacgctgcctcacagaactgtggctggctctttccgtatcccccatgcccctgctccatcatcatgctgtggtgggctctgaactgtgaggacagggatccaggctttcaccctctctctgtccctagctgccagtgcacttgggcaaggtcacatcctatttctgggcctcagtttcctcatctgtaaaatgaaaggctggattgaatgacctttaagatttccctcacttggaaattccacaagtaagtcattatagcatggagcttgcatgcatgggctccagcgtcaggccagcccagctctgccagttaatgggtgtgtggccttggatctgttacctaacctttctgagcctcatttcctttgtctgagaaattgggggtgacggcagtgtactttctttgaaaagttatggtgaggaatagataagatcatgtgtttaaagtgcttacttggcacagtgcctgtaacttagttaaattcaataaataaatttcccattcttcccatgatcatttatttttaagggacatttgtctgaccagtttgatttatgagattattggtgtttttcatgaatgttaagacgtacgtgcgtcatcttagagtcatgtactctgatatattcacacgtgcacatccacttactcggaaatgtacacacccaggcacgcttattctgtctccttctctgccacatacttgcacacattatgtgagtgtacacacatgatgcacacacgtctctgcgatcttccatctctcctcggcagccctgctggtgtattggaccctggccttcatcaccaagaccatcaagtttgtcaagttcttggaccacgccatcggcttctcgcagctacgcttctgcctcacagggctgctggtgatcctctatgggatgctgctcctcgtggaggtcaatgtcatcagggtgagggtaagcaggccacctgggccagggtggggtgggaagcagaggctctggcctctgtcctgccctgggttcaggcccccaccctgcttctcagccaaactgagaagggatcagcttgttttacccgcccgtgtaaaggggagtggggccgtggcggaaatttcaggatagacactgcatctggcccacgtgtgctctaccccagggtcccagagggagaggggggtgatgggtgtgttcgctgaggttggcggatgactttccgtagaaagggaagataagcatcaggcactggcctctcctactttctttcttcgggggtgggggactttgctttaatgtattcatatcgtcacgctggtaaatgaatgagtaagtgttttgttttcctttctgtttgctcccgcctccctctctcttcctcaccccagactccaaccttccccttcccctgcccctacctccccaggcagcccagactaatgaactcgtttgtctttcccatgctttgtttttattagtataataccatatgtgtctgtctaaataaatacctattcaggttttttcctctcaacacaagtgaatatgtaggtttcccccacggtatttatcttgtaagaatgggatcatattatgcagttttctgcactgtgcttttctcacccaacaaatatctcttgggactccctccaagccatctgatatggctaattccgttttcttaatggctgcataatattccatcgtatggatgagccataatgtgttcagctatttctctatggatgggcatttactttgttgccaagttcttgccttcatgaataatggtgtgttgaacatacttatatatttatgtattgctgcttttatttctatgggagagagtccaaggaatggcgttgctgggtcaaagggtctgtgtattttaaattttgatcagtgttacatattgccttccagaaagactgtaatctgccagcaatgagtgagaaaaccctttccctgccttccaaccagcagtgagggctacagccctttcgaacttggactgcctgcatttctctgactcttctgcttttagttggtgatctgcagggcacaaagctccttatgtgtccccccatccagtgaccctcacaggaaccctgtgatgcaagcaccatcccctttatagatgaggaaacattttagatgaggcttgtccaaaaacaccttgctagtaagtggaggaggcaggattcaaaaccaggtctgcatgacttggagttctgtgaactgtatatgaaacatggtggtatccttagatctgtggagaagatagcatatgagagattcctgctcctccccaacccaacctaaacccaacccagcctagccatggggggttcaaagtcgacctcaatgagcagttacaaagtcaggatgccctgacattggtggccaagaagtgttggggaatccttttcctggtaataattacaggcgaaagatggccccatctgttagagatcaagtgtggaatatcacaaccccagatccttgctggggcaaggtagggagtggtgagaagttggacttacccatcccccatggcccatgtgccccacagagatacatcttcttcaagacaccgagggaggtgaagcctcccgaggacctgcaagacctgggggtacgcttcctgcagcccttcgtgaatctgctgtccaaaggcacctactggtggatgaacgccttcatcaagactgcccacaagaagcccatcgacttgcgagccatcgggaagctgcccatcgccatgagggccctcaccaactaccaacggctctgcgaggcctttgacgcccaggtggtcagtgggggcacagccacaccatctattcactgccttctggtttagggtcacagagagggacctcaaagggcattaggtcaaaatcctggtgggacaagaggggaaactgaggctggtgaggggaagaagcttgccttaagtcacacagtgaaccagggacaggtgcagggctgaggattcataggacaggcacagttggaatggcccttaccgtttaggtcgtctagtccaaagtccttatccagatggggaaactgaggctctgagaagggaagtgaccccactggactctcacatccctgtgctctttcctctgcagcttactgactataaaggttggagtgttcacttgatttggagcaggggtgttagtggcctgatccttatggtaactctatgagttgagccagacaggaatctccccatatcactgaggagcaaattgaggccctgagaaaggctgtgacctgcccagagctggccacagctggcaggcggcagaggcagtctcctggctcccagtccagtgctccttcacttcctctgccctcgcaccagggcagttgctgaggcagacacggtggcaggtggtaatgagtgagtgtggcacatggccacctcctcattccagtgctgtgctcatcacatagtccctgaccagctgtgtgaccttgagcaatcatctggccttagtttccccatctagaccatgttggtgttgatagggccctcccaactgtgcacttgctgattccatgatctcttcctggagttcacctatttgcagaggatgtgaccactgggtttccccagacaacaggagctaggggcatcctgggaggctaggcccagccgtgaattagccctcaggcactctgacctggccatggtctctctgggcagcggaaggacattcagggcactcaaggtgcccgggccatctggcaggcactcagccatgccttcgggaggcgcctggtcctcagcagcactttccgcatcttggccgacctgctgggcttcgccgggccactgtgcatctttgggatcgtggaccaccttgggaaggagaacgacgtcttccagcccaaggtaggcagccccaggggtagggtaaggcaccctctagatggttttcagttgtttctgagagtgcaacaggccaatgtgtgtgagccatggccacactggagtggctcctcacacatgcgcaaagcccatagcagtatccccaccacagaatactctacatctggtcaacagaaatgccagagggcgagcctatgccccaagggtatcctactctcctctcaccgtcactaccatagtacctctcccggtagttaggtcagtccgaaaactgcaggaagtgcttttgtttgtccagtgtctagagcttctgtgacttggatttgttggctttcagttcatgtcatcttagtaaactctttaaaagttttcaagatctgtcttcttcagtcctgtaaaggctggcacttgagctttctgcaggggcatcttgggagctactgtcagaggagagagaagtgggaaaccctcacgagtggagctttgtctctccccactccaaatttcattcaaagctgcccgtagttttattaatatgttggacttttccattaaaatttcttttttaagaaaagtttccatggcttaaaaaacactggagacttattagactagattatatccaatggccttggcagttgtaacgattctgcaaactgaaatttgttggagctagaaaacctttccccggggttatttgccctgcgtggggccgtagcatccacttcgggggctgggcagactgtgctctgttgtctgtttccttgcagccgtttaggtttaaatggccacaaaatgaaaactttttcacccctaataagtttcagagttttagtttccaagtgaggatgtcattataacattttaaccacagacagtctgaaaataatgcagagaatggggaattagggtttttaataatttatgacaccctttgcgtaacatttgttcatctcatgagctccaaaatcgcagccagcagttaatcctcaggaggtttatgttcatttttctggagacataattagtcagctgaacagttttggccacagatatgagatacgttgagtctgatttatgcagcaaactttcattgaacactgctgtgtgccaggcctgggttgggctgtgggaatatgaaagcaatagttatgatgaggatgattaacaatattaacagccacttactgaccacataatacatacctggctgtgtgcaggagttatccatgtgttatttaatccctaaaactatcctttggcgtgagtatattttgcaacatctttactgtggtatacctcaaatactgtacagtttatgagatgataggtattcttatccccattttacagatgagaaagttgaggctcagaaagtttaagtaattttccccagggtctctcagctagttaataacagaggcagaatttgaacacaagactcactccacagtctgggcatttacagccaggaagctaaattgactattattatcaagccatcacctctggctccaaggattatgaaatccaacagtgaggagagaaatcaaaataaaatacttttatgctatgtgttacatgtgactcttaggaggaatattcagggaattgtgggaaaagatagtgattaacttagccagtggtcatgaacagcttcatagaggaggggatgtttgaaaggggtcttgacggatgagtaggaatttgccaggctgccatgggaagatttcttgctcaaccaagaatgcaaggaccacttttgcttatttaaactttgatggcttttgaagccatatctggctttttgagcctctctactttacctggcccataaaagagaggggaagcggctgcttctcttgtctacaggagtgtcacctttggctctagcctgaccataggctaccccagaatacccccattggcgatcctgaagcagcatggagccagttgttaatatcagggggaaatggcacaggccagagcccttatcagagtgtccacaccacgctcttcttcctgtgtttcccaaaacccttgtgggattctgctaaggagagagctctgaggcaggacgtgccaaagagatggcgaaagcacttagaattttagttcatctgaacgttatcattgccgtttttttctctttgtttatacacaaaccctggggtttattaccgtctcattggaatgctcttgtcccagttacttagcacacaaatccctgagacagatggccctgcctcagtggcagtgggccttatcagatttaatattttttccctgcagcccaaacacaatcagaaaatttccgacacagaaacaagagttgaaagtaaatatagtctccagtgtccgcaacaaagaactctccatcatgtggttgcctgggatgtggcttaattctcatgtgggcttctgagctcagaaaatgggggaaagggatcatttactgagatcatttggttcatctcccagcccccaagccattctaatccagagagaaccgagtgctattctggtctttatgaatgacaaagaaggaagctccctagctacatgttgcagtgtttcacagtctgggagaggaagccgttttttctgcccagcctgaatccatcctgcagcagttggcacagcgaggcacctgtggtttattcatcatcactcttccttcctaagatactcagagttggcaagaaacatgtcatccttggtatccgcaaggacgaacatttctgatgtcctctttagttactgaaagtgtctgtgacttgccagatctttgatgctcctgtcaccccgctgccactccccagggaaagctgggacccaggttgggctctgcctatgatctatagctctttccagcctcctctccaacccaacccctactcccaatctgtcacctcccatggatgccactgatctggctgaaggacaagagaattagattcataatgagctgctggtgtctgaaacctgccagcactgccctgggctatcagttgagccaaaggaagaaggaacagtctgggtttgatcgaagggctaaagcttcaaacagcctctaagtctcagtaggaaaatgtgtaggtttgggagggtgtatgtgtttccgaatgagttcccctaagaactgcttatggttctatatgtgtgttctgtttgtccctgtgtcttttggtgtgtctttttctgcgtgtgtgtgtgcatgtgtgtgtgtctatgcccccgtttggattgccatatttgtggctatcattatgagtgacttaatgagtgtatatgcattggtgtttctgtgactttgtggttttgatgcatgggctggcctcttcataaccatgtccatgcagctggtctggcctagagtacctgccttcaattcactagctccttcttggccatcaagactctgctcaaatgtcacctgctccagggagccttcacctggttgaattagatgccccttatctgtgctcacataacatcctatcaaagcgccctgtttctttccctgacttgatcctctgtcccctattgcctgacctctgtgtgcccagcactcagcccactgcctgacacccaggagatgcacgggaaatggttctgcaaagaaggaataatgcagcaattactatatattgagtgcttacacttactgttttttcacatgcactgttacattgacttctcataacaactctctgaagtcccttcatagcctcaccttacagatgaggaaactgaagctaagagaggttgaggaacttacctaaggacacagtggctaatatatgatgagtcaggacctctaagtccaggctcttaaccaccgtgtcaaacagtcttgtatgaatgggtaggtgtgttggtctctgggtggccaaagataattttattctttacccagggcctcccggggctgggacctacggacaactcaccttttgacacctgccaaaataggaaacaagagtccaagtgatcccctctcctttaagcaccagagaacatgtgaaggggacctttccaatcatacctctggcctggcagagacaatggggctccaaactgtagagtcgggagtgctgggttttagtcctacctctgcagctaactcatttattctcctcagcagtcacattctgcaagcctcaaatgcaaaatgtgtaataacttctgtagaaagtacatgggggcatgaagatcattggcttgattgcttttaaaaaatcggtattgagcactactggggaaatccctggaaacaaacacaattcttccctgagagcttgtgaaaatgcaagactagggcctatgattttccaaagcattttcttccaccaagtgtcaggttgtaggtccttggtcttttctctcttgccttggtacctgcagggtgctgaccagtgctatcatatcccctccccgtttcctaggaccctcttctcggtagactccaacagggcctgccttccttgggcagcatggcaggcctcttggctagtctagtacccacttcttttttttttttttttttttttggatggagcctcactctgtctcccaggctggagtgcactggcgcaatcttagctcactgcaacctctgcctcctgggttcaagcaattctcctggcccagcctcccaagtagctgggattacaggcatgcatcaccatgtccagctatttttttgtatttttagtagaaacagggtttcagcatgttggccaggctggtctcaaactcccgacctcaggtgatctgcctacttcagcctcccaaaatgctggaattacaggcatgacccaccacgcctagtcaggtacccacttcttaactgaaacttagctattccaggttctatcccttttaaaccaactctttgaagagaggtctaataatgacccaatgacttatagctgcagtgagatttttattttaacaggtcacaaaattctcaatccacaaaagtagatttctgaccctaggttattttgttgggggcggagagaggaagtcaaaggttttgcagcctttagagctgcaaaaccagaatttgttgttttgttaaaaatgcacaaataccgacgagtatatttaagtaacacccatagtctaacgaacaaacatgatcagttggcttttccagccctcattctccagcctgtgtgttttctgctcattgtaacacagcgtgtgtgtggcattccatgtttctccagagctttcatgagaatcagtggtcttggatgcatagtgttcccatgagtaccttaattacctaaccattccctgtggttggaaatttatatgggtttttgcattctccttctgctctgaccccaaaataaatgtctgtgttcatacagctattaccttatgtgaaattattttctttgggataaattctcatgatgtgttgttgctttaaaatagtggactccagtctccagagctgcgtctctgcagaggacagtgggacagaagaatcccagggcatgttaaaaaggaccgggtcttcctaaacccacatgcctatatttctgacccagtaccagccaggggggcaagtttccatcccccacaagtcacaaacctgtaactgacactaggatgcttaaggtcaaaggcctggacgaggcctagacagtgggtctggggtagtgtttttgacatcactcaggttcatgttcacatgttgtccccttaccagcatgtgaccttgggccagccactaaccctactgaaactcctttttttcatgtatgaaatggggctaataatggtaccctcctcattagggtattgtgaggatagagttttgcacctgataaatattgtctcctgccccttcctcccctggaaattcaggtctctccctgcagcctaattttaaggcccatttttctgcttccagcccacccctgcccttctaccttcgacctcctccctctgcctctccctctggtgcactggcaaatgggacagagagcctcggtagggccttcctcttagagtcttgcacgcatccctcagtggtctccctgtggctgcttcctgctgccaccaacagatacagacccctgtcgcacagatcatggtagagacagtggtgagcaggaccagacagctccagggagcagtgagggctggcttagagaacctctgttaaactgagaggccaccatcaggaagctctgatccaagatccaggaatccctgactctagggaaaggcctccaatgagagcctgggccctctctgcctgattctgattgtggatgtgccctcaaactccttctcatcactttgttccatccctctttaccctgcagcagctcccacaccctgccaaacaggatgcacagtccagggcagtgtctgagaaagagcagagatctgtcttcatggaaatattgatgtggctctgctggggagcaatggatttatcaagatcaaagttttcctgggagttattgatgcttaatttggaaatagacacactgttgatccctggtatctttagcaacaaagttaaaatgtttgtttttcttcactggttgccatctgagatcttgccggaagtacacaagagaaccttaaatttaacaggaggccctgggagcccatgaggctggcgggcttgggtctgaaatcttttcagtctcttgtaagtgatgagctctcattctctcctgagagctctacggtgccatgttttccactggccttttctgctcagtaattgctacattacaggctgttggtaagttcggaacaagggagctgctgattccatttctgtagcagagaacatgcaccgtgagacttgttgtaccagttcaggttttaggtgctctatttattcttgccccattcagaatgctctcccctgggtctgtggccacaatgctaagagtcatatttatgggcctgcagttgtaattgggccccattctgttcccccaagtggaaagatgaacagggtgtaagcaaccttccctgtagttagaaaaacgtttagttggatttatcagtctgatttttcactcataaacaattgcacaagcctttgcaagcccagagggtcttgtaataatgatggccgtggtccattatggcacagtgatgtgttctacggtggtcattttgctggcaatgacagtcacctctgaacttctctttccaacagacacaatttctcggggtttactttgtctcatcccaagagttccttgccaatgcctacgtcttagctgtgcttctgttccttgccctcctactgcaaaggacatttctgcaagcatcctactatgtggccattgaaactggaattaacttgagaggagcaatacaggtacttggatgattattttttcactttgccataagaaccattattaggaataatgtccatgagtgttattcatcctcatggacactcaagaataattctgctgtaaatttattttttgttgcccattaacgatgttttaaaacagtaaccattgacaaggcagtgtgggatagtggaaaatatcttgggctgaacttgggagacagtgtagctctggctctggttctgccttggactgggtctgaaaatccagctgctcagcccttggcttgaaagtggtagacgtcactaattgatcacagcactctttctgaccaagggtaaatgcaaccttggaatcctctctaagtggctgttccagagttctgctaccagacagtcttctttgggtgtgaaaaaaggaatgtgcttgacatacaaggtctagatagcctctaagacagggtcccctctaagatggggtattggtccatggcctgttaggaactgagccacacatcaggaggtaagcagtgggagcaagcattactacctgagctctgcctcctgtcagatcagcggctacattagactctcataggagtgcgaaccctattgtgaactgtgcaggcaagggtctaggttgtgtgttccttatgagaatctaatgcctgatgatctgaagtggaacagtttcatcctgaaaccatccctctcccccaggtccatggaaaaattgtcttccacgaaaccagtccctggtgccaaaaaggttgaggaccactgctctaagttctatttgaacccttaagtcttgctcactaatgagagtgacctatttggtctgttgggtcacttaagtctaggctcttggtcctgccttctgtgatttccttcttagagtttctggaaagatgatcaaagccagggagtgttcagggcccctctgaagaaggtgatgatgagagttgtccaagtcccagggtcttcactaggattttggttcagctatcagactagagagacatcctgattgagagtagtttaaatgggatagaagtttgtttattcttcagatagagtcagggctgacacaggagctactcaatgatcagagacctggcttcttctgtcatgttgctctgccagccttcttttgtgacttttgtctccatagccatggtgggtattgaaactgccactatatttacatttaaactagccagaagaagggacaagaggagggaacgcattttccttttaaaatggtaatacctgatttgcacataccctctcgcatcccattggtgagaaagtggccaaatggccgtatctagagagtctagaaagagcttggtctttattcttgacagctatatatgcactgctagaaattctctgtgcaaagaggagaatgggcattgggaataactagatgcagctatgcctagtgatgtccatgaagttgtggtaaaatcctgaagctaccttgttctttggaaatgttcctcagaatcattaacattagtcatgtgggagacaggagaagaagctctgcagaaaagggaccgagaggacaaggatatagcttgggctggggacaatgtcagagtccaaactctggctatcttggaatagtctgtgtgaacggtgccctcccaagttgtgcagtgcacaacctgtgcagctatatatggcaaccctgcccatccccagtggtttctcactgggaaagcagagtatttcctcagggatgtcattatgtgacaatagtggaaaaagcccaggaaaatctaagaccttctaagactcatgggggcccagagctgggaggaaccaagctgttgctcagttcagaaaacttctctagaaatcccagcctctcctcacacccctccagtgacaggcagacttgcaccaccacaagcaacagccacttttgtggttgggcagttttgtaattaaatatactaatgtgtgtatgtcataaattacattttccaattatgccaaaagagccaaaaatggttttttaatggttagcatataatcgtttttatcaaattgcttgaatctttcatgttaataagagagattcattactatgccacaaaaagcaaatactggcattaattatagaaacaaattaggggggtggagcgcaatggctcatgactgtaatcccagcgctttgggaggctgaggcgggtggatcacaaggtcagaagtttgagaccagcctgaccaacatagtgaaaccccatctctactaaaaatacaaaaattagccaggcatgttggcgtgcacctgtagtcccagctactcaggaggctgaggcaggagaatcgcttgaacccagcaggtggaggttgcagtgagctgagatcgtgccactatactccagcttgggcgacagagtgagacttcatctcaaaaaaaaaaaaaaaaaaaaagtggctcatgcctgtaatcccagcactttgggaggccaaggcgggtggatcacaaggtcaggagatcgagaccatcctggctaacatggtgaaaccccgtctctactaaaaatacaaaaaaaaattagccaggcatggtggcgggtgcctgtagtcccagctactcgggaggctgaggcaggagaatggcgtgaacccaggaggaggagcttgcagtgagccgagatggcaccaccgcactccagcctgggcgacacagcaagactctgaaaaaaaaaaaaaggaaagaaagaaggaaaggaaaggaaagaaaggaaaggaaaggaaggaaagaaagaaagaaaggaaagagagagagagaaagaaagaaagaaagaaagaaagaaagaaagaaagaaagaaagaaagaaagaaagaaagaaagagaaagaaagaaagaaaaagaaaagaaaggagttagggagaaaaaaaccctttctttctttcttttggagatttccggaaaatgtacccttacggatgagagcctgtgtcttcatgggttagagaataaccacgctttgtgcataaaaagttattaagcacaattcctgaattatacataattactagctgtcagtcagttgtgcatttctgtgtatgctggtcttcacttaataagactttatttcacagatcacttggtgtccctacttcactgaaactaggtgattatcttttgaagtctcatttcacataacctaggaggtatatagatttctttaaaaatgtcattgccattattttaaaccttacccatggtatatataaacttacagaaagacagaataggttcattattttaaaccttgcccatggtgtatattagctcacagaaagacatagaataggttcctgccttaagaaaacctgacccacaaaaaagcctgggtttacacaaaagaggaattaagggcggggagcccaccttacaacagaatgaataatagaattttatccaagagcaggcatcctgaggacatttaagacccggatgcatttttccttgttcaagagcacacatccaaaaattgcagtctttctgcgagtcatgatcactctgcacataaagcgtttaggttcagagctcggggaggccattaccatggctgctctctgtctgccctgtgagggtccttggggtggctgcactctggggatggtgctggggctgactgactcacgcggtcgtgtaacacatcagaccttccaaagtcgaacccttgttttgtttcaaggctcaattatgacaggacttggtctcagagcagatcccctccctaggctggagaaggccactttaaaacagatggcctgccccacttcatcatttttatggctctgatctgtgttctccactggcctctggtaaatcaagaatacaagtggacatgaagatctgctttaaaaaataaagaacagaccgggtgcggtggctcatgcctgtaatctcagcatttggaggccgaggtggatggatctcctgaggtcaggagtttgagaccagcctggccaacatggcaaaaccccatctctgctaaaaatataaaaattagctgggcatggtaggcacgtgcctataattccagctactccggaggctgaggcatgagaattgcttgaacccggaaggtggaggctgcagtgagctgagatcatgccacttcactccagcctgggaagcagagcgagactctgtctctaaataaataagtaaatgaattaaattaaataaaaataaagaaccaattaagtcctgtctacaggaaaaggccttacttgctggagaagtagcttgctgtgctggagtagactagtaagttggaacggtgatacagtaccaccttacagagctgctctagggcaccatggggactgtctgagaagcccctggcacactgtaacaggtggcatctggtgtggtgatgatgatgagaatgatgatgaatgtgaaacactctgctctcatttctagaccaagatttacaataaaattatgcacctgtccacctccaacctgtccatgggagaaatgactgctggacagatctgtaatctggttgccatcgacaccaatcagctcatgtggtttttcttcttgtgcccaaacctctgggctatgccagtacaggtactagatgggctgaggggaagggaggggggcagcaggacacacaaccagaatctgctggtccatggccagtaactaggagcacaccgtcttccactccatgcttgcctgtacctttcacacacttggctataccacaggctgtacctctgggtccctcctgtcccatactctgcaagcactgaccatctctcttaatgaccagagaaggcagtatcattaagactttaaaaatggagccaactttataaactatagaaaaatcaagccaggttcaggggctcacacctgtaatcccagcactttgggaggctgaggcaggaagattacatgagcacaggagttcaagactggcctgggcaacacagtgagaccccttctatgcagaaaaaaaaaagaagaaagaaaagaaaaatcgtacatggaatgcccacagatcttaaaagctatgttgtagcaaaatatttaattacatcaaaaagtgttagtgatgtatttttaagcaaaaagagtaagttacaaatagtatatgttgtatgcttactactaaactggaatatatgttatgtatacatttgtacagattcacacatgaaaaagaattggaaaatcacatagtgggattataagtgatttttattttctttatgtgtttctaaattctctaataagcgtgtataagatttggaaatcaacaacatgatacttttagcctaggcaacaaagtgagaccctgtctgtacaaaaaattagctggaagtggtggctcacaactatagccccagctactcagaggctgaggtgggaagattacctaaagtccaggaggcagaggttgcagtgagctacaatcacaccactgcactccagcctgggcgatagagtgacaccttgtctcaaaaacaaacaaaacctggtgttttttagccagatgtggtggtgcgcccctttagtcccagctacctgggagtctgagatggaaggattgcttgaccccaggagttcaaggctgcagtgagcaatgatcacgcccctgcacttcagcctggacaacagagagactcctgtctcttaaaaaataaaaataaaaacgttaaaacatggtatttttttaaagcaagacaacctttggtgctggctcaggaagaggtacattaccccccaataatcagaggagaatcgtcagcatgattgatctgacctcgggcttcatgtgtcccatctcccacccggagctcttccaccacagagtctgatcctgtcctatgcctgggactaaatcttcaccctggtgttcaggccagaaaccgaaatcccagacccattcccagagggcgggaaggttccaccgggagagcttgatgtagcagaaagtgacttgggtgagacaggctgattcaaatacttaacctctctgagccttggtttctttatctatgaaatggggaggctgcccaccctctggagttgctatggcaattcagttagataatgtaagtaacacagcaggcagagtggcccccagagtcttcacttcgtaaatatcagatccctctaccttgcacatgtttggtatgagtgaggtgttaccaatccagaatccattgcttcttgggataaagattccataaaccttcatctccagtgatttgtattggtcctccttacttgtaaagcttagagtttaaaaatattaaaagaaaaaaaggggagaggctcccacagggacacagctagacaagatgagatgcagggaatctgatgttcttttttatgggaacagtcatatatgccatcccccattaccacctacccatgcccagactgcccccgctccattctgccaagacagatcaatgactataaaagctacaaaagggcctggagatctcatctagtttagttaccaaccaaccttttatgcacaagactttctaagctgggtgtggtggctcatgcctgtagtctcagccactcaaaaggctgaggtaggaggatggcttgagcccaagagttcgagtccagcctgggcaacatagagagacctcatctctaacacaattttttttttgaaacatgaaaaatgaagatttctgaccatgcttctctcattagttaacactttgggctgtgagggtctgatgcagagagacacagcctgggaggatcctaacatgtacacagcattcaaaaggctacaagacactttctgttgtgtccccttgaacaagcagtttgtaagattttgttggccaggcatggtggctcgctcctgtaatcccagcactttgggaggctgaggctgatggttcacctgaggtcaggagttcgagaccagcctgaccaatatggtgaaaccccgtctctactaaaaatacaaaaattagccgggcatgatggcgtgtgcctgtagtctcagctactccggaggctgagacaggagaattgcttgagcccaggaggcggagactgtggtgagctgagatcgtgtcactgcgttccagcctgggtaacagagcgagactcggtctaaaaaaaaaaaaaaaaaagaaatcaggttttgtctactaaacctgctgcacggttaccgttactagtactcacagggtttgttgcacatgcatcgttgctaatagtgctaactaatattaacagcccttgccctatgcctggccctgtcccagcccccctcccttgtataatttaacccttgcactgggggtagagattttcatatctactgatttcttacctttgctcatttatcatggagtgtcctttggttttctgtgtttgtatatacctttaccacttatagatttgaccagcactcaagaaccagtgttactcctgggagttaatacaatcccagccccatggcaaagaaactcatgtggttaggattctgtgtgcagcctggttagccacagggcacgtaaggctttttataatattgacatgagtgcagaagccccattcccgtgtaagccctgagggctcttgtttcataatctttttttggtcacatgcacacagctttattgagatataacccactcatttaaagcatacaaatcagtgggttttagtgtcctatattcacagagctgtgcagccatcatcacaaatgtggaagttttcatttccccaaaaagaaacccgtacccattggcagtcactcctcatcttcgcccccagcccttggccaccgtttatctacacatacttttgaaaggctagtgaaactttctcagaaaaataaatgcttgctcaaacatttgggctataatttcaggggcttcatgggtgcccccctgacatttatcaagaacaccaggttaaggaatttagctataatggaggcctctgtgtttcccagtctcctgggtatcagaggcccagagagggcaggtgccttaccctgggccacgcagtgaaccagtggcagcaccatactcacacatctcctttctgcggttccccagtgacagagttctcaggaagctttttcatttattttctgagaggagggtaggccatcttgtattgatctccaactatatgccagccacaattctaggtgcttatcataaaggttcatttaatcttcacaatagtcctgcagagtggacagagtccttcagagtgggcattataatcaccattttaaagatggagaagctgaaaaccagagaggttaagtaactcacccaagactgcacagcaaaaggctggggctttgaaactcagggccacagactccaaagactatgtcctccccactatgctagatttttttcctaacctgtgaataggagacaaaatagtccttttatttctcacagttgctttgcacactcagaatccatgatttcttctgcatgagggccattcagacctgtgcagaagagagtaatggaccaaggagtcttgggagcacctaggaggaggggatgggggagcatgaggaggagccagggaacagcagcagctgcagcaccagctcccaccccagcctctgccagtctcttggaggtggtgtgggtgcagacaccggctcacaaggtgccctgttagtgagcttggggtgccatgggagccttcttgttgtcaggcccaacccaagctggctgaagaacaccctgatggcctccatttgagcacaactaatgaaggactggatgccagagataagtccaggagggtgatgctgcagggcaggccagggaagagggtacttcatctctatcatggtcctctgcccatccatgccagcatctaacacctgttaaacactgggaggcaggtggtgaaggggccacttcccagcctctaagatacctcctaagccaggaggcattctgtgattaaattacagggcctcccacttactcctttatccttgaggcggtgctggaagcttaatgccaatctggtgtagggctctgggactacaggaccaaggcaagcagtcctttctctctctctctctctttttagctaaggaagccagcacatctgttctttgagaaaaagccctgtatttagaggtgtctgcctttgaaggcaacctgagaaactgtcatcttggcgctttggggactggccatttacacttctcataaatattcagaagtaggcagtcatttacataaagctaaatgcagaaggaattctcttttcagggaatacctggcagattcattaaaaaaattaaagaaaccaagagcataagaatgaaaagcgaattctcggaccccaggctggttttttctggcatgggtgcagtaactttgcctctttgctcagttatcacttttttccaatgacagtaaccataagccctgagagccagcaaatagaacaaaaggtgctgtcacaaacattgtgcaatctcatctctgagatttccatctggaaaatagactggagagagttaaggcttcaaccagccttgcagataaatgcagttagttaccagcccagcaaccctctgcttgcatgagagcccattatgctaacctccttttgaaattgctttgtttctcctccttccctgcactccactccccaagataatttggaaacctgggcaccaaggcttgtcccactctaggggactggggaaacagggattttgccagcacctcctggcagggcaaccatcaggtcaaagggacctgacccatgaccccttcctcagatcattgtgggtgtgattctcctctactacatactcggagtcagtgccttaattggagcagctgtcatcattctactggctcctgtccagtacttcgtggccaccaagctgtctcaggcccagcggagcacactggtgagtgcccaaaggtgtgtgtgttttgtccctcttcccctccttccctcgacagcagcaggtctcctcccacacacccacactgtcattgactttgactttgactttgagtaggccacttcacctgtccaggcctcagcttctttgtctgggaaatggagtcaatgggggaggaggctgcctcccggtgaggacaggaggcgggcatggcagtgacagtattgacactcaggccttcctctcgggtgggagacggagcagaagcctctcccctctgactcggggacccctgcaggagtattccaatgagcggctgaagcagaccaacgagatgctccgcggcatcaagctgctgaagctgtacgcctgggagaacatcttccgcacgcgggtggagacgacccgcaggaaggagatgaccagcctcagggcctttgccatctatacctccatctccagtgagttcaccccacacagccagccctgggtgctgctgcgtacatgcaaggagagggtgtcagagctcgggtaagagggggtgcagggacagaagcaggaggccttgagattatccgactcagtaggggagcctcaaactggctctgatagctaagctcccagaaatcaaagtactcttcattcatttatccaacaaacatgcatggaaagcctgctatgtgctggacactgtgctggccctcaggatacagtgatgaggaagagagatgaagtttcattcctcatggaactgatatgttattgacagacagcagcaagtaagtaaatgaccacagttttgaactctcctaagaatgaagactttttagtaagtcagactgagctgtcattgccctggggaagctacaagaaagcttccatccacttggggctatgcaaaagaaaaagactagttatccttaaatatcagaagcccaggctgaaggtactcacaggtgtagggactgaatttatattaaccaagtagtttgggaaccccaagccaaggaagaagaaaaagaccaaaactggtaaaagtcctagagtcccatatacttgaaaccattttactgagaatgtaaaacttttttttctttttttgagatggagtctcgctctgtcacccaggctggagtgcagtggcaaaatctcggctcactgcaacctccacatcccaggttcaagtgattctcctgcctcagcctcccatgtagctgggactacaggcacacaccaccacacccgactaatttttgtatttttagtagagacagagtttcaccatattggccaggctagtcttgaactcctgacctcgtgatccacccgcctcagcctcccaaagtgctggaattacatgcatgagccactgtgcccagcccaaaagattttttagaaattgaaattttagttatggaaattaattcagtgaacaatggtcccctggtcagagtgagggcttacggaggtcaggtgatccatggagtcctggcccaagtttatctcacagttggtctcgtggctccgtggacccatcccatggtggttacttcccaagtgcataattgggatgtagatatttagcaaccagctgacttcacactagttccctgacctgtccagtctaagagtcattatggccaagtggaagcccctggaaagaagaaaacaaaaaagaaaccaaaacttactcagtgcacaggttacatgaatgagtatagctgaagagagaatttttgaattagaagacagatgagtggggattacacagaacgtggcaaggagagtaagttggtagaaccattttacagatgggaaattaaggccagaggggagtgtgttcctgagatccctcctgaggttagtagcatggctcggactagatcctccaaagtctcttaactcctggtctcaggctattttccacaaagagctgggggcctctgtggggtgaagaagacttaggacaccatggggcaccattatgaggccatttcctcctaggagaaaaaaaatctctgggctctgaaaggagtagaattagggtaggaaattaagagaggctaccgaccacctcctccaactaaaattggttcttttggtgccaggaagagacacacctggtgggggagggaaggtggtaatggagggggtgctggtagtgtctcccagatagacccatccaacaagtctcatggagaatgagacggtcactcaggtcatctgcgtattcttggcattcttgctgcctagagagagagtctgatggagctaggtggccaccaagctgtcccactccccaagacagtttggaaacatgggcaccaaggcatgtccctgtctaggggactggggaaatatcccatagcagtgttctcacagtatggggctggccatgaataccccaggagtccaacctccctttgtccagctagaccatggtgtcctatgcctcaggcagggaatgtggtccagtcatcagtggctgggccgtctgccatacatggtgcaagccatggcgttttatgcagaaagtcctgctagcatttgattttctcagaatggagctgtgagcatggcaggcaaccactgtttcctggattcttcaccaagacaccccaagttcctggtctctccccgttatcctcatccctgaccctgtggttctcagagcctccaaacacactcaggctaagcactccatagacaggggaaatttggaaggaacatctagggagctcagaaaagccaatgtccctagccccaggcccacttcaaccttctctctgtcagtcctgcctgcccctggaggctggttacatgaagagtaaccccctgcttgtgtatagccccccagttttgtacaggtttagagacagttcccagcagtaggaacagctgccgaggtgggagagggcttctcccgatagccgggggacttcctctcccaggaacaacagggtggggtagagcaggcttgtcgttgctgagatagagagagggaagggaaacaacaaggaaagtgggggcactgggtccccaaggttcctggcacagcaagcagtgaagttggggcagcctcaggtcatgtagtgggggcaggtgacatctgctttgactgctcctaagagatatgtactcatctcctggattccaaactgcagcctgggacatgttttcttatataaacagcatcaaaagatgtgtgagttcccaggctagcccactgaaccctacctagtgggtgctcattgtcccccagagcccccagaagacaagccgtggctttgtgatgggcctggggccaggaggacctagggatatgttgtgaagagctgagaagactctggaaaaaaggggctctggagccaagcaggagcccgcccaggactcctcacgtgtccaagtcacctagggagagaaacagagcagcccaggttggtccctggaagagagcagcggaggaggggaaaggggagagcccctggggagagctttgaaagtcaagtgctgtttgctcagtgtgtttgcctttccgaggatgtgtttttttttccctccgttagtcagcagtgggagggggagagagacgggtggtagggtgcagggtacctcctggctgcaggcatatgctttgagtgcgtgttcatttacctcctctggacttcctgccttctgttaccagggatcaagacacaggtcattaggcgtgaggtaatggggcatctcttgttctgacccctggcgccagtcttggagtcctgacgctgcagaggagccccagagtcacatttcctgttggggcccatcctgctcatatgcggcaccatcagacttctgggcaggcaagattacctgtgactctgtctgatggtctcgccatcaatatcactgagagtagctgtgtatggagtcccgaactggtacaggataaaacagggggctgaaaagggaatgaatgggcacagtttctctggcatcaaaagtcacatccagaattgatatttcctgttgagtaaaaatagaaatataagttgctcagtggatgttgagtgagccctattcatgtgccccactctgtgccaagcaccaggaaggagggaagggaaaaatgataagatgttctccccgttctccaggagtttatgctccactaagaagtcagagctaacatgcacagaacagtgtggcagcgagagcagaaccgtgtggccagctccatgcttgccgcctagcaagcgtgattgcacttcatcctcataacaacttggtgaggtgtgttgctctgttgtcccattttacagcagagaggactgactctcagtgaattgaaatgtctcagtgaggtcttccacagcaaaaggcgaagcacagagaaggaagtccatgtgggctgggagttcacccagagattcatgtaggggcaatgtgggctgtaccttgcaagatggtgggatttcaatgaggagaagacaaagtgggaggaagctggagacaaggactgtggtctcttcctttagaagtcagttcaatctttttttccttgtggaagcagcataactctaggtggttcctctgtatctgaggacaagctttgtagaggtgacaaaggggtcctaggtcctatcaggcaagcactcgatatgctgccagttcattctgtccattgtgagatacccattccagagcgcttcctctgtgccaggctctacggaggttctggatgttaaagaggaagcaggcatggccctggccctcccagtcttgtgggagattgatcatgcccatgaatagtgaccatgtggtcagagccacagggtcaattccaaatgcccctgtttctcttttgtgttactcacctgactctgggtctttcgtttcttccattcattttttttaaacaaatatttcctgcccaccttctgtgtgccaggcctggggatgcagtgggagaagcctctgtcctcctcagtggaggcgctaactcagaacaggcagtggagaaaaacaacatgacctggagacctggtgccccttccttccccagcatctttgaaattcttttggttgttgttgttttgagatggagtctcactctgttgtcaggctggagtgcagtggcgcgatctcaactcactgcaacctctgcctcccaggttcaagtaattctccctgcctcagcctcccaagtagctgggattacaggtgctctctaccatgcccagtaatattttttgtatttttagtagagacagggtttcgccatgttggccagcctggtctcaaactcctgacctcaggtgatccacctgccttggcctcccaaaatgctgggattacaagcatgagccactgtgcctggcctgaaattcttcaatatctacctgcccttctgccagttggtgcagccacagtgggctgcttatgcatatcctggcctggcttggtggggagcatggctgagggagagccggggcacccatcaattaaggaggtaaagatcagtctgactgagatgcctcctgccacacttcctcagctgccagcaactgacaccattaacctgatttccttccccctctgttgactgcactgactattggactgaatgggaaacagccccgtgcacctcaaaatgcacttcccctcctgcagatgcatcttgcaattaggcccaaactgtgagcctgcatgctcctcccctggccctgcacaggcaacaaagctgaagttaatcagaggtacaaatggctggctatgcctctctgacacgtaacttctggaacatgtatcaatgctttggaaatgaaaagctcctggtattgcaatgccaggctggtgcccataagggccagaaaacattccttgggcaaagccagggggagtgggtgatctgatcccagctcaggtttgttgatttgttgttttgtttgtttcgttttgtatggggcaagggttgagggtatgaaaaacttacactatcatttactaccgtagtccccagaacccagcacaccagcacaaggcctggaacagggataccttttttgaatgaataagtctttttttttttttttttttttttttttgagacagagtttcactcttgttgcccaggctggagtgcagtggcgcgatctcggctcactgcaacctccgcctcctgggttcaagcgattctcctgcctcagcctctcgagtagctaggattacaggtatgcgccaccacgcctggctaatattttggtatttttagtagagatggggtttcaccatgttggccaggctggtctcaaactcctgacctcaggtgatccacccaccttggcctcccagagtgctgggattacaggcgtgagccactgtgcccagccttgaatggataagtcttaagggatatttttggaaaggatattctaaaaaatacccatgtctctacactattgcagaagggctttcagttttgatggcagcctttcaggccagcctacacgcaactaaacttttccataacagcatcacacttacacaagaagaaggttttataatccacttgccattatttaacatagttcttcctccttaactttcaagatctgagcactataatgttcttctttttgtttttgtttttttctaaatcaaattaaggtgagtcacctcaccttgggcctgagttggacagaaatctattcttggctatattccccacccctccaccaccttggaaccttatagaactttatgtggttcaggaaaatgagggcgaggcctcagatcttcaacccatgacagctgtatgcccagctccctgccttcctgtcttacccccagctagggcacaggactgactattgtgcccagagaggtgccagagcctgtaacaaccccagacttcccaggtccagccacatccaccccagagccccaaaagatgatcttcagagagacctttaaaacacaagtagctggtcacttccatccagaccagaacccaagatggctgtgctcttgctgagacatgttggttgtcattgcctccgagcccactttagccctcagctctgtaccagaaatgctgttcctttgggaatcacagccaaagaagagatggagcagttctggaataagaacacaagttcaaactgtcccatatctccccacatcactatctacagttggtctcttcccatggcgatgtccatctgccaccgtggcactggtattgctttgagtgcaggggtctctctttttggcatgttggccctgttactccctgggaactttgagtcttatttggaatgcgtgaagtccctgtgtccggggccagcactgatccacacagctaagtttgcactcatcttccctctcatgtatcatatctggaatggggtctgacacttgatgtgggacctaggaaaaggcctgaagattccccagctataccaatctggagtggttgtcccggttcttactgtactgtcctctgtagggctggcagccatgtgaagaacagaggttcccagcatcatcttcctacacattattacattcacccatctttctgtttctcacttttatctccagcctgggaaaagttctccttatttgtttaaatccttttgtgcttttagatccccttggagcagtagagtaccttgtagaccataagagtggaaaagggtctagttttctccttgtttctaaagatggggtggctgaaaaaactccccttttttgcctacagcttgcctctctgggcctagaagtggttattctgtctccatattggcctttgatttgtgctgagggtcagcttttggctccttcttcctgagacagtggaaacaatgccagctgtgtggcttctgccctgggggctgggggtgaggctttgggtgccactgcctgtgggttgctggcttaaaggacaattctgttcattggtgagagcccaggccattaacacctacgcagtgttattgaaagaagagaggcgggggtggaggggaattagtctatcccagctagagggagataaagagggctagttagttcttggagcagctgctttgaggagaaaatgtatagcttttgacacaacaggaagatccagaaaattatcattgaacatattaaaggttatttctttttcttgcaaaacacacacacacacacacacacacacacacacacgcgaacacacgcagctgatgattctactctcccagccccagccctgaaggggacccagaactccctgcacaaaggctgtccttcaaggggagggtgaaagaagtggaaaatcacattttcattctttagcgtctccatacaacagccagaactgggcagaagctaattatatcagaagcatactccatgttgctgcatcagctttgggatgttcatttttaaatttatttatagcttgtctcattcctcaaaggagttcagggagctacaaaaataaagacaataaaattgaaaaaaattaaattaaaaaaaccatgaccagggaaaatgtgcagtagaatgaagtgtcaattatcacgttttctgactgcaaaatctcccccacggctgatgcaccatcatttactacaacagcccctcttgttggacatttccagtttatttcgtttgggatggtttgttgctgttgctgtggttgtggttttgttttattgaattttgtgttagctgcagctaataccatcttgctgatggctttgcgctgctcttgaatgattactcaggataaatttcctggagacggattataggatcagaaggtctgaacttctgtgtggctctagctacaaagcaccagattgctttccaagagcgttgtagcaatttataatccaacactcagcctattttttggctgggagtcaagccccagaatgtgaaggaggggtcttggcctggagcaggggctgagggatgggtgcacaggacccctccttattggttatttatggggatgggccaggaggagcagaatagaggcccctgccctcccagttgctccttggagtgactgaccccataggggaggggcgaggctacctcacatttagaactatgtagttggtgatggtcaaggtcctaggtctgatgggcatcctcctccctctcctcctcagccagtaatggctgcactatgtcgtatgtcctagatctgggtcccttttgctgtgggaacaccaataatacttacgctgtttcctgccggaaacggtgcaggagggctgtggcatggtagtgggccctggaaaccatctagccttcatgaggaagggcagttaaagcacaggcatgtatgatgttggtattgattaaaagcctcacgggcagagaaattcgccatctgccagggccccagccatacgagggctccagccatacatcctccaggagactgggacctctccaattgcaggagccttgccttccccatcagattaggaattccccgaggatggggacaatgtccttcccacctgcttgagaactcctaaggggcatgtactctgtctccccattgtatctggaacttcctgggagcatagctcctgtctccgtcctcagactgggaatcccctaagggcagaggccatgtccttccacccacttgggattccctgaagttggggaccacatctctgatgtacaatgctttgtatgtactgactgctgcaggattcttggagtaaatgggcagtcaacttcttggactggtattgaccatctggacttcatcagagtgtccaagactttgccattcattagacaggggccatgtgcacaggcagagccctggcctctggcttctggctcctgactcctggtccctctgctttaatttggctaatggcagaaccagactcctttctgggctgccctggaaggggatccttgaatgaaagaggatagatgggaaggtggcagctgacatggttacctcttatgccatgggggggctgctctctctggaaatttaggcctggggtcagggcactgttgagcattttacaccctaggccagaggaggggtgacctgtggagcagggctaagctagtagcccatgaggtatgatgtgtaggcagcacctggggctcacagagcctgttacccatgttatctcctctgaccttggaaagagctggggtgtatgaacaagtatttataagtttacaaaaatcatatgaggaaactgaggcacggggaaggtaaatgacatgccctaggttacacagcttataagtagcagggattctgcccttctgtcacaccaagtcccactgtcttttcttcctggagtccctgtgactgatctaaaggccacatgtttaacagaataaggaggaggcctctgttgcagcaaaccagctaccccacccgcacacagactctaagggacatcctgctttaagctgtccttagttactaatacctcagtgagaatgagtttgaaattttctcaagagccatgggagactaggaagtctctaagcttcatagagagcctggcttggggggacacaggagccaaaggcagaggaagaagtggcagctttgtgcccccagaaacacgtgctcctgacctcacagttggccacagccagccaactctcccatccttctcccaccactttcccgtggggctaacttcaccctgtccacacggagtgacttaacagtttaagccccagagtcgggggccggggtacctgggacaagagtcctgagggaaatggggtgaggaactggaagtgccacagggctagagttctgcccctagcctactggagctgtgccccacaggctggccccactggactgcgctgcctccaagccatcctgggcatctccatgtgtagctgtcacgctcctcccactaaacgcctccctgtgcttcctctgcagttttcatgaacacggccatccccattgcagctgtcctcatagtaagtggatcctttctccatctcttgggggtagggtggagggggagggcgtctgcagtgacaggctgcccagatttggcctttctgcacaggggcctcagaagacaggctccacagccagactgaaaataggatcgaaagtttatagagggtgtggcccctccccaactccagccgaacaggggcctctgcctccaggcctggaagaccggaggcttagtatttagagaaattaaactttcttttaaaaaatagctatccaaatttttaatttttaaagtgaaacatgtgtattgtagaagtgatgggaaatccagaacagaaagctcaaagagaattaaaatcacccataatcccactggtaacatttttaatgtgtttctttccagtctttttttaaggcctatgatatgtcattttctacaaaaataggaatgtgctatgcatgcagttttgcaacctgctcttttaaatttaggaatatgccacacacaattctccatgccactgaatattatgatggtggctttctaaagcaattttgataaaagctgtgtgtgagctgagccatgggggtcaagcagcatgctcctacagaaaggcctgggcccctacgagcctgcagccccctcacccagcctcccatccccatcttctgtgatggctgcagttccttaaaaagatctgcttatttcccccggggccagtgtccctgagctgtgtagagttcacagcctgtcggatacacttgggaattcacttccaatgtgatgtattgagctggttcctggcctggctcctgggggaactgtgggtaacagaggccactgagccagccaggtggctggggcaaagcactgtgcagtttcgtaatcactctgtttacgttatcccgatgaggactggggagatgagcaccccgcctgctgtctgcagagggggccgtgctgacctaacccgagatctcctccctgcttattcccagccaagactgggcaggacagggagtcttggccaggacagggagggagcagcccctgctctccagcttgaagtcctgaacttgttggggacgtttccatgagatgactgtggggatgatgaaggtgtctccaactaaaagatcctcttaggagcctgctccctgacagccctctcatttcccttccagtgctgagcgtttccagtgtgggagggacccacaccctgggccaccctggcctcacttgtgcctctgtccacagactttcgtgggccacgtcagcttcttcaaagaggccgacttctcgccctccgtggcctttgcctccctctccctcttccatatcttggtcacaccgctgttcctgctgtccagtgtggtccgatctaccgtcaaagctctagtgaggtgaggggagggtccgggcgagggcactgggcaggcaggtcctgtgtcagcctcaaggcttgctcgagtgatggccaaaccacagctgtttggtcccggaacacacccccattgctgggccttgctgtagctggtcctggttggtcagagggacattggcctgtatggtttcccagctcgccatccctgagcaaggacttgcttacatacctcccaggagaggggactcactgtcactttcacgacaacttaaaaaaaaaaaaaaaccagtgttgagccaaatgtggaatcctcctaaattctacccactggtcctaacttcaccctccagagccaccaagaatgaggccatcccgtccccacgtggctgccccatggatatcagaaggcatccactgtgtctatctttcccaggccaagtatcccctaccctttccacagcccctgagccctcacagcctcagccagtgaaacagcttcccccaagcgctgggtcctgctctgattggcccacagctcttggaggctcccacttccaggctctagagcctcatggggactctgccactgtcccagaggcattgccctcttgggaatgaaagcctgaaggtagaaggctgaggctttggctgggaaatgccctgtctggagtgagaagatgtccttgggcctctgaagtagctctgcctccttgaaagcaagagcctgtcatgcctctatggagggctggcttgtccttacccatggccagagaaccagtcagtaacaaatgtcctctgtgtcttcagccttgaggaaggtgacacccctgtctcatgggaccctggcaggtactgggaagctggaaggaaggagtagctgttggaatgaagtagctgatagagagggtagcttgcagggggagactctagcatgggttcaaagatggaatggggcataactcagcaaaattatgctctaaggagtatctgaccaggcagtagctggttaaacagggattagctcccatttccacagtcggctgtgctgactcagtttcttgaccagggtgttgtggggtctgaagatcacccctcctcccaccacccactctccagccctatgattctgtgtagaaaccacagatttaagaacgctgcacctgcctgaaaactgttgcactgatcccaaagcgttcatattttcaaacactctggatcccactgtttccaggaatggaacaccagagtagcagaggccttttcagtgaggcagctcaggctctggctgaaggtgggcgcaggacactacctgaagcttcaccccaagagatgagggccagctccactcttcccagtcaccgcctgtgggggagggaggctggacagggcatgaaggcagagcctggtggtctgcccctcccatctaggggtggcgcacagaaagggagactccaggccacagctcacttacaccccagaataaccttgccttgagggtgggatggcttgtctgccccaggcctgttggacatttagcaaaagagaagaaaggggaatacaaacaatcctgagcttcccagaaagctttcacacctccaggatgggagagaatgaactagaagagtgaagcttccagtgcttcctcaggtccacagggaaatctggacaggggagagggtaggaatagccgcctcccccgtgagtaatgacacctcctccagcaggctgttatggggatccgattacataatgctacaaaacagttaacacagtgtctggcatttagtgtatgctcacaaaatactagctattgattctttaccaatcctagtcctaactaaccttaaccctgaccaatccaacaccaaccatccttcagtctaataacccagactaactaacttcaacattaaccctaaaactaaccaatctcacctccaatccagaccccagcctattccagctgactggtcaaccctagcaaaccctggtaacaccaattacctgcccccatgcccactggtctgcccccttcagtgtgggctttgtgggactatacttcaggcctgagatcctgctcagagctctctatcaggctgcgccctctcccctcccctctgcccctggcaggggtgaggggtgtctctgtgcttcccgagcagcgtgcaaaagctaagcgagttcctgtccagtgcagagatccgtgaggagcagtgtgccccccatgagcccacacctcagggcccagccagcaagtaccaggcggtggtgagtgcccggcctccccttgctactcccagcatggtcctctaaggcccaaaacttgggcctgctgtgtcggacttctgccttttttcccaggaagaggggctcccttccctacacagctcccagcccagtgggtcctcacctccaaaccacccccagcccctcagggttgtgaaccgcaagcgtccagcccgggaggattgtcggggcctcaccggcccactgcagagcctggtccccagtgcagatggcgatgctgacaactgctgtgtccaggtgagtcctgctgccccatgcctggccacccagcaccaactcccagagggagctcagcacctggaaagccagaaagctgcatgcttagtcctctgcagaggtcaccctgcctgcctgtacggtccataggagtccagaaaccagggaccaccaagtggggggacccccagccttaggcaagggtcagcatgagaaggccagtctcccactcccctgctctggaagtgatccaggggctggaatcagtgtcttttggctttcatggaggaggggaagccagagactattcactgggaactggctgcctttctgttctctcctgggcggtgggacacgcctaatgaagatcatgggaggctacttcacgtggaccccagatggaatccccacactgtccaacatcaccattcgtatcccccgaggtatggcccagtccacccctccagcatgcccctccccatgtcccactgaataacatagagataaaaagacaaagctgcatttattgagcacctactctctgctcattcttggtgtatgccctgggtatattatagaaggggaaggctacattctagaggcttccgtgtgctgggtgggagtgaagcactaaggacagggtaaaattgccagccttaatgtcaaaccatccattgcagacagtataggtaatgcacaaaaagatcagaagtgggtagccaaggaacgcaagtggaagtgatggggtttctgagaatggacaaaggccctgaggccatgaggcaggaggattttctggcagaggcagccatgagcaaagtatggaggtgggttggaggtgggacccaggatggtgtttcttgggaccacaaggagcctgggctcatactaggagcatgggaaaggagaagcgagtgcttaggaagggtggcggggcaggaaatcagagagggggaaggacctggggagccagaggaggatgttgatttccagaaggaaaggattaaagagggagaggacttgctggggattctaggtaggaagaaagaaaacaggggccccagggttgggtgcatctgtctgtctgtctttctgggtaatggttgttcagactcccccggccccactcacatctgccaccctccctccctgcaggccagctgactatgatcgtggggcaggtgggctgcggcaagtcctcgctccttctagccgcactgggggagatgcagaaggtctcaggggctgtcttctggagcaggtaatacatgtatcctcagggcccagtggaggggaaatctccttttaaccatcctcctcagttgaggatgcacacacatttattggagggcccactctgtgttcagtgaggactcaataaatgctgctaatggatattctcatcatcatcactagtacgtattcacctcttactatgcgcaggttctttgctaagtcctttgcatgcattatttcatttaatttttatgataactaacaaggtccatactgttctcaattctcatttatagaggaaggttaaactatttgtcctaattcacacagctaataagtggcagagctggaattgaaactcagttctgtcagactctgaatcccatggttactcagatgcacggcagtaatttcccagtgtgggaaattgcaacaccaacattggtttccagcttggtcctgagctgcactgacctacacaccataagtgggtgttctgaagatccagatgtaaccaataaatgttggtttctgggcaaagatcactgtcttaattaaagagccagaaccccaggctcagtcaatcacgaatctgttatttatacccacctacttccaagaagcacttgaaactagttgatgaaagattcatgtaaaaatcaaaaccacaatgagataccatctcacacccgttagaatggtgatcgttaaaaagtcaggaaacaacaaatgctggagaggatgtggagaaataggaacgcttttacactgttggtgggagtgtaaattagttcaaccattgtggaagacagtgcggtgattcctcaaggatctagaaccagaaataccatttgacccagcaattccattactgggtatatacccaaaggattataaatcattctactataaagacacatgcagacgtatgtttattgcagcactattcacaatagcaaagacttggaaacaacccaaatgcccatcaatgatagactggataaagaaaatgtggcacatatacaccatggaatactatgcagacataaaaaaggttgagttcgtgtcctttgcagggacatggatgaagctggaaactatcattctcagcaaactcacacaggaacagaaaagcaaataccacatgttctcactcataagtgggagttgaacaatgagaacacatggacacagggaggggaacatcacacactggggcctgtctgggggtggggggcaaggggagggatagcattaggagaaatacttaatgtagatgaagggttgatgggtgcagcaaaccaccatggcatgtgtatacctatgtaacaaacctgcacgttctgcacgtatatcccagaacttgaagtataataaaaaaagatgcatgtaaaataaaaccctttaaaaaggtaagaaaataggaactgagaaatgaagagggtaaaaagatgttcagcaacctgggcagaggacaactacagccatcaacataaaacctggctctgtgccctctggtagccaagggaaaaagggatctctgggctttggagtattcatttaggaataaaagttgcagccaatcagcagaagggcaagctttccctaccaatcatttctaggggaaaattattgaaggtgtcaggtttttcataagcatgagtacagaactgagcagggagaaagactttgggcccaatgtctgaatatcaacatgcacccccgtttcctgcatttccaagatgtccctgaatggtgtatccaaaagatggcaaatttccctcctcagtggggtcgtgggctagcagatgagccccttgggtttcccatcacctcccatcagggactgtgatgtctttgggggcagaggggtctttgcctccattcgccattttatttgggagatttttcaacatagcctgactgggaaggcccaggtattcggtttgagatcatattgccttattccgactgcctctccagcctttggagggaggagcccttttctgctgtccaactgcatgcctgcagcaagaagacaagagtccccagtgcactgtgagctgaagaaagtaaccaatatttattgggtacctcctatgggccatgccctttgctaagtgcattgtcaacatgatctcatcaagcctcctactaagtttaggaggggagtgttgttaccccatttcacagaagcagaaactcaggctcagagaagttgggtgacttactagtcagtgtgtggagcagagactctgcccatgttctttccctcaaacctggtcactgctggggcccccagggcctagtcctaagggttattgtccaagccccatgtagtggtcaggctggatctgggctctcctccaaggcagggcttttccagaaggattgcagggctcagacactggagctgcccctgccttgacctgctcagcatggatgtcaaaacccactctgaacctggtccctttgccctgctttcttctcctcccccaccctcatgccctcatgtggcatcgtgcctgcctcaggagctctccttgtcctatgtagatgaagcaggcatgattggcaggggtctgctctgccctgcctcagtccccacctcttctccaagctgtgccaaccctccgggtctgactgctgcccctctctcttaggaaacctctgccccagcccagggaacacaaggagcctctccaaggcagaggaccctaagcacttcttttttttattattttttattttattttaggttctgagatacatgtgcagagtgtgcaggtttgttacatagctatacatgtgccatggtgctttgctgcacctatcaacctgtcatctttttaagccccacatgtattaggtatttgtcctaatgctctccctcctcttgcctcccaccccccgacaggctcggtatgtgatgttcccctccctgtgtccacgtgttctcattgttcaactcccacttatagtgagcacatgtggtggttggttttctgttcctgcctaagcacttattataggccaggcactgtgcaggcacctcatcatctcagtcagtctgcaccgaactctgtgcagtagatattattatatcctcatttatcagattaggaaactgaggtgaagcaagttgtccaaggccacccagctgttaaatggcagaagtgggatttgcacctaggtgctcaagtgcattggtttgccaccatgtgctcaaagagaaggggcacaagagcctcatgaagaaggcatagctagcctgacagtccaaaggccagcagccgctgtggccatgactcacacacacctgcctcctcccagaactgccacgtgggtcctcacagctctgtccttatcaacacttactctcctttacaggtagcctaggccccagctcccagctctgttcgaggctcgcagaggggcggtagtgaaggggtctcatttctccaggatcctctttgctctctcgcccggtcctggtccagcttccctttcaagcatagtgaagtgcatttgttagcttgcagccaaccctgggaaatcatgagaatttgttcccaagtcaactcattctccagcgtccacagtgacgtattcactcacccagttgagcgcctagtgtatactagaccctgtgacagcaacaggagtgcaaaggtgactaagacgtggcccctgctttttttttttttttttttttttgagacggagtctcgccctgttgcccaggctggagtgcagtggtgcgatctcagctcctcacaagctctgcctcctaggttcaagcgattctcctgcttcagcctcccaagtagctgggactacaggtgtacaccaccatgccggctaattttttgtatttttagtagagacggggtttcactatgttggccagggtaatctcgaactcctgacctcatgatccgcccgcctcagcctcccaaagtgctgggattacaggcatgagccaccacccctggccggccccgcttttaagagaggggagagaagacctgggccttagaagagctcagaggaaccacaattgactctgcagtcaaggagaggaggctcactgcggatgtggtatttgagccttgaaggatgagtgtggtttcatcaagtagaaaaggcagggatgggaaagggaggtggtccaggcaggggtgatggtgtgggcaaagccttgctgatattaaagaacatagttctgtgcacctggaacactggatgcatggggtgcattatgaaagatgggactgaagaagtgaacttggcttagatcccatgtagtaggtctgagaagtaagatttaacccaaaggttgcaaaagaaccatgcttgtgataaaggatgatggattggggaaacagagaaaaagacagacagactgtaggaagggaggtattagcaaataatcataacacagtgtgaggtgtgcattaatattcactcattccaagtattgatcaagaagagaggtaggtactgggttaggaaacagcttgggcaaatgcatggggaaatgagagatgtcaagatgcattctaatggcagcctcttgaagatcttaagttgtttttggttcactcatttcgcaaatgaattcatttagcaaaagcactatggatacagtgcttacctctaggaagtaagttttagcccaaatgctgcagaaggatcatgcttatgacaaaggatgatggactggggagagagaaaaagaaaagacagacagactccaggaaggaaggtcagtctgcagctccttatagtggctaggagaaggagtctaggcagatacgactcaattagcttcatctgctgtttgtctctcaaaatctagacatgtgcactgctctggctggcccacctatcctgggcattgagttaagtgtgggggctgtgtgttgagagtccccctccattactggcaggaactccacacctcagacattgagccccaggtctgcagggagaagacgtgcttgcaaagtgagctaaaagcaaaacagcctctgacctggcaagcattcccaagtctgcacgcctgcagccagaggagagggtgatgccaggctgctgctcagatgcttttcagccatacccaggccaagacctggtgaccaggcagccagaaggagttccaggaggcacaaggcaggaagttgggggattaggaggtgtagaatggagaatgctctggggagatgggtgctttgttggtgcaactattcgtttattcctccagtgaccacgtgagcagtatggctgcacacacaggctctgcagccaagctgcctgggttcacatttggtctctgtgctttggaaaatttcataagctttctctaccagtttcccttattacccatgagattgatgtgaggattaacctagcatgtagtaaatatcctataaatattattattcaatagtgtacttctttgccaggaacaaaattcacctgttcctctttaaatgtcctccagtctgtctcctgggaaagattcttgtgagctccctggggacagggaccatattttgtttgtctcactgtatccgtagtgctttttgctaaacgaattcacttgctaaatgaatgaaccaggaacaacttaagaccttcaagaggctgccattataatgcatcttgacatctctctcctttccacatgcctttgtccgagctgtttcctaacccagtatttcactacccctcttctccatcaatatttggaatgagcaaataccgttagtgcatacctcacatggtattataattatttgctaatgcgtctgtctcctccatgactctgagctccttgagggattattccatgttgtaccccaggtgccccatgcagatgtgtattttgtgcactgttctgtgtaggctacaaaggaaaaggcctagcacctgcccttggggagctcacccacccaggatggacagaggtgtgcagacagagctgcagggtgggcacaaagggtccatctgctgaagtcctgcagatgcagccccgagcttgtccctcacgtcagcagcctggctcctggtctcagagagaactgtgtggttcccaagcattcactttaggaagaatcacttgcccctccctggctctctgcttcaaggaactgtgacaaccttgggatttgcaaactctctctttaatccttaagaggaaaatgttttggtaaaaagtcaagattagcagatacactcgggtgaaattctttccctggaaataaagaatagagccattaatatccacagtagagtgactttaaatgcccccggggggtcagcaggaaccagggccctgaggaaaggatcagcgtggggaagaggctcccacttccctgtgaggagctgcacatgcagtctcactggagctccctgctgcaatgctgttgcctgtggtggttggtgtggatgctgcctgccaagagccctgattccccaggaagagagaaaaaggcttctctcaggacggccctggtcgcatctgcctgtacaattcctggagcctttggggagctgaagtcaggggctcaagtgcccctgggtttcctggaggaggcaggtgtggtgagacagctgacagacaggagaagggatgctctgaggaagtgactgtccagccatgggaaccagatggcccctggctgtagtcctgatgctgccacttgctagctctgtgaccttgagcaggttacttcacctctctgagacagactcactgtctggacaatgagtaaaaccctacctttcctgtctcagagatttggcaatgggacccaatgacatcaattggaaaggatgctgtgggtgaaaggtaacctttcaggacagcgacaagcctgtctgggcaggatgaatgggctgtggagccctgtatatcctagctcactctttgaacctcagtttccacttcttccctttttatttattgccggggtcttaaatgagtgttgggggtatctgattctccctctgcctgtacttttggggccaagcactgagctgaaaagacaattcctcctagttctccaagcctacaacctgccccctaaccagctgtgagctgtaatacattctccagtgtcactgtgaggtttgtgccttcacccccattttatagatcaggaaacagaggctcctccaagtaaaggagcttgcctcagatttcacagccaatgagtggaaaagcctctgggattcaaatgtcagagcccatatttttcctacttctcgcacctgttatcatatgctgcctcttcctttaacctgcagttccctcccttcacctccaccgtctcaatccttcccactctttaaggttcagttcagctatgacttcttctatgaggctctactcattttctcagatttcttcctcctccaaatttcttgtaaaaattatgttttttctctgattctaaaagaatgcacattacattagaaaagatacacaagcatacagaagataaaaaccacctaatatcccatcacccagaagcttccagtttttctttatgcatttgcatatgcatttgtgtttacttttccccaaaagttctccgatactttgtcctacttttcttttgacccttataacttcctgacttcggtacctttctgatttgccctaccagagtgtgagcccctggaaggcagcctctgcaccctgattcaggttgccacacatatgccagctcctagtgggctggagggaaggacatgcggttggggaactggaagactcatgctttcagctgtgtgcttcctccctagagtgcaggcagaggaggaatcgaatcccctcagcactcttgtaaagaccacagcaatgagtgagagatggtgcctgccagacataccattctttacttttcagcttaaaacagatacaaagtttggggaggctcactggaggaggcttggggctacactggaaagagaagaacttggattcacaccccagcttcccctcttcccagctctgtcacatttgcaaactctgagtctcagtatcctcatgtgtaaaatggggatagggtttatagggttgtaaggatgagatgatgagttgtttgcaaacaacttctcacagtgcacagtgaaggtcagcaatgagagccagccccgccctttcttctttccaaatgattaatatatctgttaccagcctccattcattatatagctctgtcatgtgctaagcaccatgggggctgaaaaagatgttcttcctgccttaaaattccactggggatgaacaaattacacgggagctgatcagagaggaaggcagtccattatgagggctaattgagcagtgcagaccatgttgcaaactgagttagggcctggagagcttactgtgtgctggggtcctcaggaatgccacagatgcatcaataaccacctctgctactctggaagtagtcacatcaggaagactccagagataagcttatctgggctgtggccacagagctggaatttgtaagctttaggtttctatgtctcatgttaccagcttgtctataaattgtaaattacagccatctgatggttagggaatatgaagtttggttaagagaatgaaatgagaccacgaagattagagaacaggaaaagaggggactggggactacatacccatcagaatcttcattcagtcctgaccctcagcaggagggggatttcatcaggctcatttccatccttgatttcgtccatcctggttctcctgacaaggggcatttatcagagttatggcatgggaaatcacaggggagtaatgtaccatggcatttaagagtatgaacgttggagtcggagctattttctccgctacttactagctgtgtgactttgggcaagttacttagcctttctctgagcctcactttctttatctgtaaagtgagggcgatcagaataaacctccttcatatggttattttgagctttataaagagacaatactggctgagcacggtggctcactgccagtaatcccagcactttaggaggccaaagctggaggatcgcttgagcccaggagttggagaccagcctgggcaacatagggaatgagactcctgtctctacaaaaaatatacaaaaattagtcaggcatggtggtacgtgcctgtaatcccatctactcaggaggctaaggcaggaggatcgcttgagcccaggaggtggaggttgcagtgagccaagatcacgccattgtactccagcctgggcaacaggagtgaaaccctgtctgagagagagagagagagagaaaatactactatggtgcttataaaagttcaataaattttagctgttgttagtattattaaagtaagatctgtatgaaaataaagcagattttttcccccaaatgttcatgtcagaagtatatatttcattggcaaggggctgcttctggaaggttgagaggtatcctgggggaggggatagagcactggcaaaattggcatcacaattcaagtcacctcactcagtgttttttaagttatcaaaatccacagtatgaaaagcatttgacattacagtccactatatttatgcatttataaacaagagaaaaaatcacgaaaaatacagtaccacgtgcagtacacactgattccatctattctttttttttctttttcctcaaatgcacttgccgcctacttattccagacccaatgattgggtccctatccacagtttggaaaacactataagaaatgattgtgtcctctcactttccctctctgggatttagttttccaactataaaatgctcctgatgcccagccagcctcaccgctgctccgagtcaatgccaggaacgctgatttagcacatgctatttggagggtacccatccaggtgctgtgggagggacagagattgagaagagtgctttctgaccccacagaggccatttggaaaccctgggaatgggtgggagggttggaggtggggattgcttctcccctaagactcagcgtgatggaaaggcaatggggtgggaactaactggtgttggtctgtcccatttgtgtcccagcagccttcctgacagcgagataggagaggaccccaggtacagccttgggactgggtcagaagtgggtctcaacaaagggaaggggtagggtgggggtggaggacttgtgggtgggtaatgctgagtatggattcagggatgtgcagcctacatattttcagagacatggggctaaggcctgcattctcaatgagggcaaaatttggttcttggggacagaaaacacttagacattgcaatgctttgtggctgtccaaagtaccaaacagatgccagtatatctgtggtgctgaaatttcatggtgaatggagtcagaaaatagactagcgattgccagggtctggtgggagagagagggaagggactgccaatgtgtatgggatttgttttggggaagataaaaatgttttggaattagatagtggagatagttgcacaacctggtgaacgtacttttagtttcagaggttttctaaacctctgatttttttttaagtgacaggaaagacagaaaaaagtatatctaaaaaggctctaggggtgatcatggaaaagaaagttaagaaatatgactgtaaggaaaggagatgggtgtccctcaggccaggcagaaaattcagtcttgttgctttatgttcatgtgcaaatctaaaaaatccaagtgatatagattaatgaggctctgagtccctcaaaaccttccctccccttacctctccaaaaaacacttgagataccctagaggtggtatgaagtcaggatgggaaggttggctcagctttgcaaataagtttaagcctctggcctttgctctccaacaccaaagaggcttcactttggtatattttctctgccctttctccctccttgtccccaactgtcagtatgtgatgacaggctcagcctctgtaatggtagtgatcatatttcttgagccaaaaatcagacctcatggcatgtgacaagtttgcatatgtggatgagaacagagtggcagaatatttgacacgggagcagcttgggcagtccagggcacatggcactgcacctgacatccctggcagatcccccacattccgtggttgtcttctgatggggccatatggggctgcagatcatgcctggagccctcgcagctccagggctgcgggttcccagccccagagtgcaggtgctggtgtcagcctgcctggcctggcctggctctgtccagagcactccttgccccagctgtttgtgcagctgtatcagcctcagacctcagcctattcattccaacctgaatgcagaggctgggtctggaggagccacattgcgggcttcatactcctgatctgacaagttttccccccagagcctgcaccaatggcacctctccccattctccctcttaactgggtcctccagggccctcctcacacacccacgtggtcaggcagcagaggcttccccaagatgggcacaccccactctccacacctctctatgcagcatttgtggctacagactgggtccaggggattgtaaaggcatgctcatgttgggttggagggagctcaggatcttcctggaggatatggttcactcccatgagagctcagtatgcctttcctcccctgctgcagcccagagcgggagacagcgaccgacttggatatcaggtactgcgtcctgggaacattgccccccagggtcaactccctccagggtgctctcaggcccaagggagccacatcaccctgctgggcagcccccagaccccagccccagtgttgggggaggccagggagggcccctgtgctccaccaggtggctcgggagctgctgctgtttctgtgcatccatttactcccttcacataagatcatttttatctgggatctctttttcttttttcttcaaaaaccacatcactcaaaatgtggcttccttggctctgcttttaaaaaaaaaaaaaaaagttcttccatttggagaattacctgctgacttcaaagtccagtggcttgagggctacccaaagagggaggaagccagaagttgagtgttcccttggtttggtcacacttttgggctcctccctgactaaggaacaacagactgcagggctggggcaggctgggtgtagggcagggaggggatgaggtcctgctgccccagtcagttgagacccagacctctcaaacctgcctgggggaaggcaaggccaccagaggccacactaagcagatttctaccaactgcacctccccatccccttgcctccatctgagccatcagcttgacaactgcctctgagaacaagcccctgagaatgccttccgcaccccctactcccgccctgctttttccaggaagagaggccccgtggcctatgcttcgcagaaaccatggctgctaaatgccactgtggaggagaacatcatctttgagagtcccttcaacaaacaacggtaaaagcctgtcggagggaggcaggatgtggaggggaggaactgtctctggccagcctgccccagttccgggcccctccatcgatcacccacacccagccatctcactccccaggtgcttacctgcactccagcctctccatatggtgcacctggagaggggccaggtgtgcctgagcattggggcaatccagctcccataggggagagggcaggaatggagggaagggagagagccccgctgccttttctctagctggtgggagggctagctagctctctctgtgagtctccattcgcctggctcctgcactattttccctccaatgataatagttagggctagcatcgactgcgctcttactacataccaggcacagtgccgagctctttgtacacggaatttcctctcatgcttacaacaacctcagtaggtagatattattgttattcccactctacagatgaagaaccaagtttcagaaaggtcccaaggccacccagccagtaagtgaccaagatgggtctcaaatccaaagctgcctaacacctaagtacatgtttgtcaccaacatactctgatgcctccatgaactctggctggcacctgcccaggctaagggctggctggggaagtatgagaggaacaggctgggcaaatatttgaccagccatcatcattactgcctaaaccaaccagcagtggttttccctgcagtgccccaagcacgggttccggctgcagcttttcccactgcacagagatcatgagcgccctttcatcacttactctgcatatttgttcccaaccaattccatccttctagtatttaacctgcccaaacgctgtgtgaagtgctgacctcagctcttttcaagctcacacggtgtttgcttgcacccaagcgggaggcctattaaagccattgctcaccctgggcatagctacccagagactaatgaccctctgcaagtgctcgggccaactctgaccaggctgaccagctgcatcccctgcctctacccacgccaggtacaagatggtcattgaagcctgctctctgcagccagacatcgacatcctgccccatggagaccagacccagattggggaacgggttagtagcagcctctgaggggttttttcaaagccaggacccccaacctaccatgccctgagacactactcaggacaatgggtaactaggaaataggagacattgaaggctgaagagttgcctgcagtaaggtcaaacatgttgttcttgatgatgtcctttgacaggttttcagtcctgcttggagggcaaggtcagcttagtgccctcccaggctggggatcttcttcatttgcaccccaggtatacactgagagcccacacagcactgtgctcagcctggggttgtattgttcctgttcatcctccagatggggtcccctccacaagcttagacgaacaggattctcctgtgactgtcctccttttgtgtgattttaatccctgctgcctctgtctttgtttgtactggtcagatggtccctagcgcctacacaatgaatctttaaagacttggggctcatgctgccctcttctgaatgaattcagtaaacacgtgcaagttccttctctatgcaaggtgagaagcaggcaaagaagtggatagagccaggcctccatcccaaagagctcatagtccagtagggtacaggacagtgtctcctgaatggctgagggcatgatgtgttcctcctctttggtgacagggcatcaacctgtctggtggtcaacgccagcgaatcagtgtggcccgagccctctaccagcacgccaacgttgtcttcttggtgagtgcaagttcccttggggtcctggtctctggctgcctcccaggcctaactgcccacctccacctccccgcaaccccaccatcatccaacaatctccctctccaggagtaaatccctcctgccagagatattgccttatcatcctagtgatagggaaactgaggcaggcaaggatagcacaaatgacccattgcagacttcagatggagctctgcagtagccaatgaggagaggcaagctgtagttataggctgcctgtctgtgggacagcccaacccctcaacacttatgcagcccgactataagaatggctgataacagaatgtgtgctgccacttcccatcttatgcccagtgcagacattgctaattgttcacagcattatttcccatggaacttaactcatcctcagaatccttctcaacacagcactccaggtaaccactagccatcaaacatgagataaaactaggccaggcgcggtggctcacgcctgttattccagcactttgggaggccgaggcaggcggatcacgaggtcgggagatcgagaccatcctggccaacacggtgaaaccccgtctctactaaaaatacaaaaaattagctgggtgcggtggcgggcgcctgtagtcccagctactccggaggctgaggcaggagaatggcgtgaacccgggaggcggagcttgcagcgagccgagatcgcaccactgcactccagcctggggacaaaccgagactttgtctcaaaaaaaaaaaaaaaaaaaagaacgtattcgcaatccttacactacttcatgtcaagttctgttgtgtcaggtgccttgactgacactgaagaattctaagaaccagtccttggcctcaaagatttagaatctgattagggagacagagctcacccagttcaagaggcccagcccggttcaaatccaaactgtgcggcataaactatgagggggccttgtccagggagacaactgtgagggctggagtaatcagggagggcttcctggaggagagcctcaaagggagagtcaattaaacagaaggaaagagggaggccatttgcacagtgagttggaagaaggaagctcaagtctctgattccagctttattccctcccctctccctacaccacacgcacaagcactcctttactaaagacacttcacagtgggaagattcagtctccgttaccgtctgacacacacacagcgttttacaaagcatgggtgcattcgcgatctctcatgagatttaaacaaccctgctagagaaaagtgaagtggacattttatttcagtaaacgtttatgaagcgtctactctgtgccaggcactaaacgtttatgaagcgtctactctgtgccaggcacaggcacaagaagtctcagttcttgggagtgccataatcaggaatggacaaacaatgatcagatctggctttgcgccagtgtcacgggaatagggaggaaggaagggtaggcgtgggggtcaggacaggatgcaggaggaactggtgcttaggtgagcgaaggatgggtgggagttcacaaggcagacaaaaggcagagcagcactccaggcagaggaacagctcaggagaaggcccagacggcaggcttcctgggaacctggaatgcagagtgctgggaaagcacagatgaagcatgagtctagaagggaaagcgagaggttataaagcacctggaacaccagcccacagggtttgactttagagatgatggggagccgttgaaggtccaggagtcaggcagtgaagtgattagatctgtttgagagtgatatctgacaactgccccattttaaatgaggtaaccaaggcccagagaggttgggtgagttgtccaaagccacacagctaactagcttcagtccctagagcagagttgatagaactctaatgggttttatactcattgtcacccctccccaccatgcctttccctaccctctactctcttcctctcccttctgcccaggatgaccccttctcagctctggatatccatctgagtgaccacttaatgcaggccggcatccttgagctgctccgggacgacaagaggacagtggtcttagtgacccacaagctacagtacctgccccatgcagactgggtgagggggaacaagggggtcaggctatagggggcagggctggggaggctgtcaggcatcttggcaggaaccaatccgttgtcttggtagcaactgctgagggccacaaagcataagagaccagcactggatggctttatgcatgctgggcatttcagggagaccctgtacaggccaggggtttggtatcacctagacccacagacactccccatcctggcccgggccccccatggtacactcaaggctggcaccaagaagtctcaggaataatcaagtgctcacttctcaccttctgattcctgcccttttgatgacccatccccgcagtcatggggagtgcccatttggatggaaaagccctcttcccaccctatgaccttcccggggtggatggatgcaccaccccgggaatcatatgggaaatatggaaccaaacaatagcagtagtaatagaaacttcaggctgggcgcaggggctcacacctgtaatcccagcactttgggaggccaggacaagaggatcacttgagcccagaagtttaaggctgctgtgaaccatgatcatgccactgcactccactacagcctgggcgacagagccttgtctctgaaaatttgaaaaaggaaagaaagaaagaaagaaacttcaatattatcagtagagtccaatgttgtgaaacccctcattaactaaatttccatactcttcagtaggtagaaaataattactttttgattcattagaaagcacttaatttttaagatggagatcatgtaattttgaactctaggtcttgcctactcctatataaattctcctctaaacaacagccaaaattgaggccctctttgagcttcaggctggtgccaaatggctctgcttattttccccaaaataaatcttccttccatgtatgatgagaccccctccagtataaagaagacccaaagaaaatcacccaaagaaaaaaggcccaaagataagacccaaagacctaaagatttaaatatatatacagatacagaaggtttgtttctgagtttctgtagtgaccttggcaataccttgtagttcaggacaatcctgaggaacacagaagtgctggcttccttgaggaatcagtgatcaggactctcgagccccttgaaccccagcatagggcgggagggggtgagggcagcaggggtgggtgtctgaattaatgtcaggtctacgtgatggtgtcatcaagtgttccagataaaaagttttattgagccgggcgcggtggctaatgcctgtaatcccagcaccttgggaggccaaggcgggtggattgcttgagcccaggagttcgagaccagcttggggcaacatggtgaaaccctatctctataaaaaaaaaaaaaaaaattagccaggtatggtggcgtgcacctgtggtcccagctactcaggaggctgaggcaggaggatggcttgagccaggaagcagagattgcagtgagctgagatggtgccattgcaccccagcctaggcaacagagtgagaccctgtctcaaaaaaaaaaaaaaaaaaagatttattgattccaaagaggcatggccacacacacttagaccagcaggtgctttgctaagccctgatggaggctgccagacccgccgtcaagaggagctaagggtagtgtacaatgagcccacttagtgtatgacggccgctgccgtgggtggagtccttgtgagtaaccagccagcttgagcaggatgcactaatttgctctgcaaacccagccattgagaaatacgcctcagatgtaccgaactctaggtcctaggagtatgttggttggggtaggttatcaataccagcccacttgcagtggatgagctggtggccatttgtagtgaggaaagggatgtgtcaacctccatcttagactccacaattgagggatgtgaccaccattcctccccagccagcccccaaaccacgtttgttgctgcctttccagatcattgccatgaaggatggcaccatccagagggagggtaccctcaaggacttccagaggtctgaatgccagctctttgagcac

SEQ ID NO: 15319 - DNA, 83949 bp, Homo sapiens
agaggcgcggcaggcgcgcggagccagcggagccagctgagcccgagcccagcccgcgcccgcgccgccatgcccctggccttctgcggcagcgagaaccactcggccgcctaccgggtggaccagggggtcctcaacaacggctgctttgtggacgcgctcaacgtggtgccgcacgtcttcctactcttcatcaccttccccatcctcttcattggtgagtgcgcgcagcgagccgcggaggaggggacgggagagcagggagggaggaggaggcgctgcgcgccgcaccgctcggcgtccccttccggcccgcgaccgccgtccgcctcgttcccggggtcccctgccctgtgtcctgcccgccggtccccgcactcgcacaccagctcatcccttcactcccccggtgcccccgatcccgcgccaaacacagcggacgtttgtgacccatgggatcaccaagttttgcttctgcagggccaagagctgggatggggaaaagggaaagaggaggtctcagcacgcagtgggaaactggagaggggtcgggcctcaccctccgtggcgcagcttagggagccgggtcacccctcccgcaaggcagcctccctgtcagccgcagctgggcctagggaagagggaagcctgtgctttggagtctgggatggaggcccagctaacccctatgctttcaccgggctgagccgcgcagtggtccgtgatctctgacagtcccaggcccgcgccctgggcgaggagaggcgagagctagggacttggattcccttcccccgccaccccacccgggcatgtgtctccagagcgcaacttctcaggctctgcgcaaagtagctccgactcgccgacgcagcgaccccggcgcccttgcttgcaaagttgggcgccacggccgggacaatcgtgcgtgcctctccactgaggtcccccccatctctctccaagaccttgactcttccagaccagtcaagtctatcaactcatagggtgtcccctgcatccccaaaacgtgttcattcactttaagaaaacaagcaaatcttaaaattcatatacagctttggggaagaaaggaaagattgtcacaaaattagatttacaagaggttgctgcagaagcagagttgctagttattaacaaagacagttagatagaaatagaaataaaacatacaaaatatgtgctcatatgtgcatcaaaaatcaaaaaagaacagcatttacacttctgttctcagccaaacggtttattaacctgatgacttgtcacacaagaagttagtatgtataatggggtaccttggcagggcacagtggcttacatctgtaatctcagcattttggtgggctgtgacaggaagactgcttgagtccaggagttcgagaccagcctgggcaacatagtgagaccccccccgccctttctacaaaaaattaaaaattagctgagcatggtgatgtgcgcctgtagtcccagctactcaggaggctgaggcgggaggatcacttgagcctaggagatcaaggctgtagtgagccgtgatcgtggcactgcactccagcagaggcaacagagcaagaccctgtctcagtaaaaaggtgtggtgggggaggtaccagcataggaccaggctgaatgagttggacgtttagtttgtgtgtaccagccttggggatcctcatgtgtaggtgtcaccctcaccatggacccaatgcccaagcacctttctggggttcatgcaccctcttcctcctccaagtgggcaggcatcctgcctctgactgtctctccctgcaggatggggaagtcagagctccaaggtgcacatccaccacagcacatggcttcatttccctgggcacaacctgcggtggatcctgaccttcatgctgctcttcgtcctggtgtgtgagattgcagagggcatcctgtctgatgggtgagtgactgtctgaggactcaggaaagtgaatctgctccagggtacttcctgaaaggcccaaggagatcctagctcacctatattccacaagcccatgtcttttgttactacatccagcagctcagtgtcttctatgtgccaacctctctgagctgggcactggacgcaagtgagtcccaggccctgccatcagtccaggagagcagagggaacacggacctgcatgccaagtcccagtgaaataatgctagagcctattagaatgccacaactccagtgaaaaatgtctggcctcttctacaacctgccggagttaccttcttggaaaaaaaaaaaaatctaaccatgccacccactcttgcataagacctttccttggttctcagctgttttgaagatgtggtctcagatcctcagcccaccattcaaggtcttcacagtcagccccacctatctctggcctcattccccatgcccaccttccgtttgggcctcacagcacactcctcacacctctgctacagcacagatcacactgtatgttaaagtttatgtctatttgcaaaactgtcttcagagtcagaaaggcctaagagttagaatctgagtcttgttcatctttgtgttcacagtgcaaggcatgtgataaacataaacattattcagtccataaacatttattgggtccttaggagaatgaatgaaaccatgttacaaataagtactctgggaggtgagaggaaggcagaattgggcaagctccatggttgagagggctttggagcggagtctggaagggtgactaggcttcagacacacagaggaggaaggagagagagaactggtggtgcctgagggaagggaaaaggcaccaaagagaaaagcaggtagggctagggagcagcgcaggggctggagcattaaacacaggctggggagcgatggaggctgaggctgggaacccaggttggggcatctcaggaggactgtgaatcccagcctgcatgtttgggtcggatttggtcagcagtttggaacagaagagagatgtcatcagcataacacttttaggtgggaacctgaggtgttcagcgcaggctggaggcagggagaatctagaggtataatagaagcaggacttagcattgactgcagtagtctaggtgagcaataactgcagacagaaatggtgtgtcagcagtcagggacagaagaggagcgggagcagccatctcactaaggaagaatccagtaaccagcaaggatgagagactgccaggagagggagtggtggaggagagggatatttggcttgagtatctgaggtccagcgccccctgagctggaatcagattatacccagactgcactcctgcagtgctgcctggctcctgtagttggatggcaggggataggctccctcatcctccctcccgttccccaccttcccttccccaatgtccctgcatcctggcttcagcagtgatctctaaaatacctgcttgacttggaggcagcagctctgcctgcttattaaagtccctagaccagcaagaagaccagaaggcatactgctacacaagcacgtgacaagtccgcctccacccccacccctacaccccttccaaagtagcacaaatgccacagtgagccctcagatgggaaatactcaccagatggtgacagagaaagacacctccgcccttggagaaggaagacctgggtcttcagtgagcactgctgctgtgtaccagctatgggactttgcacaagtcattcaggctttctgggcctcataagcatttataaacatacgataaaacattttagttgccaacttaaaaatgtgtgagaaagtataaggtgtttcaaaattatttcaaggagtaaagaggcaagagttttgaagatccctgggcagggtgttggctgttcccagtgtggccattcatgactgctctctggccttatgaaacaagcatcatagtccctggcttgcctgcttcatggggctgtggagggtgaaattcgagcatggacagggtgcagagcccggagtggcagagcactgggtagactgtgtattcccagaatgtgggaaactggaatgaatcggtccagggatgccctcctgctggctgtcagcagcccctcctgtgtgtggctgtactgcttcagctcagtgcaaagggccatctcctccccagggcacagatcagctcaagctgagtaattgtcatctggtctttgtgagctcctacccccaggcctgagtgaggggcaggaaaagagcagacaggagaagtcacagacccttgtgatacctccagtctaatccagcctgggttttcagagctgtctggaaatttagggggcaggtgggagggggctgattaaggcagccctgatttgatttagagtgagcctcatttagtgactaattaagccatcttaaacctgtagggcttcccctcttcctttgggtattatttctttctgtgatgttctgaattcagaacaatcaaaacagtataagttagtgaagaagatattttttaataactacaatattttcccagaccaccatacactggataaagcctgtatataaaactttacctaatttcttaactaattgaatgtgtattatttaacaaagcagctaaaaactattctatgaagccatgtcatgaaatatttagttcaattatggttaatcctcatcttatttcgtcttataaaattttaacatttctacctcctattgcaaaaaaaagcatttatatcagcatataataaaacatgtctagatgtcagcttaaaaatgtgtgagagagtagagggtgtttcaaaattatttcaaggagtaaagaggcaagagttttgaagatccccaggaagggtgttggctgtgcccagtgttgccattcatgactgctctctggccttgtctgtcttgtaccttctatattagtttgaagaccttttttggagaatattcactaaagaatatcaatatctaccatttcattaaaaaagaaatgtggagtttgccttttcaagttggtttgatgcttattgatgttttcagggacccagcctcttcccatctttccataccatcctgtgtgtgtgtgtcagcctatcttccccatggtcacaaggtggctgcctagctccgggtattgcttagcatgagcagagagggcatgctgccgacatgcctctcctttatgacagagatcattctttctttgacatctcactggccagaatacgtggaccaacactggcaaaggagtatggaattgcatggctgcttaaaccaatcaccatccattccctggggctgggtatattgctgctggagcaaacctgtggtcctcctggcacagaataaggggaagatactctttggtggacagcccacattgcctctacacttgcacctcagtcccaccagacccactgaggtcacaggatagctctcctcatgtccttcctccttctctgttgaactcttatgtatccttcaaagtccagcctggtgccacctcctctgggaagctgtccttggttgcccaccccctcctttgtgctctctcagtctctgtccatcggcagtatcacttccctagcctgctgactccaacagttagctctgagcatggcagccccctccataccatcagcttctcaagggcagggacccttggcacactggatagaagtagcctggtgggcaacagcagcactgaggcagcaagctgtagcaggccatctgggaatggagtgggtaccacagggctggagcagaaagggcaggctgggcagatctgataaagtggctggaggccacatagcctgggcctttcgttccaggctgagcagagtgggttttgctgtctgcaggagggagctgtggaagggcatgatcacgaccaactaaggtgaccctcctcaccaggcccagggaagactgaggcctggaaggaggctctggctgcctctgggtcttacccccaggccacagtccacccacttagaggcctctgtgagttaaggtggagagactatgagctggtattgactgctccattccccatcccgagagaggagacaaaatcagtgaccttggaaatgcctcttcgtgcctcagtttcctcaccccataaaatgggagactaagagtacccactcgatggggtttaatgaagattaaatgggttaacatatatcgcatgcttagaacagtgcctggcacagagtaaatgctccataaatactgactctcatcagtttgttatcacagcctctggggagggcgccagtgctgacttatgctgttcgtgttaaatggggctgtcactgggtgagttgtggcatacaggcccctgcactgttcaagagaccccagcaacccttgtgcttagggctcagcacatagtaaggcctccagatcatatacccagctctactccatgtactggcagctctgcccagcccataccccaaatacgcccattaactaaagggccctgcagcctataaagtgatgctataaaggttcagtgttcagcctttgaaattcaaggcctgggctgctctattgcagtacttagcatgtccccatcctgtctgtttctctctcccatctcagggtgaccgaatcccaccatctgcacctgtacatgccagccgggatggcgttcatggctgctgtcacctccgtggtctactatcacaacatcgagacttccaacttccccaagctgctaattggtaggtgaggtgtaggagggaggggcagtaccttcattcatttcttcagataatgtttactgaggactcattatgtgccagctattgctctaaacagtagagatttggaatagaaaaagaaaaaaatccctgccttcatggagcttacagtctggtgaaggaggatagacaggcaaagacagtgaataaacaagcaaacaaataggtggtggggatgctatgaagaaaatcaagctgagtaaggggtaggggcaatgacaatgttgctatctacacaggatggtcagggaagggctgtggtaactgtgggcatgcagatatttgggggaaggtattccctgcaaggggagtgacaagtgcaaagtcctctgatagggatagatttggcaaagatgtcactgtgggcaaagccaaatgagcaaggggaagagtgggaggtgagggcaggcgtcaggagaggagcgagcaagagtcccaggctctgggcctgagagcctgggtgaactgtggcatcaataactgatgtgacagaggagggggaggtgggctgtggtggggataaagttttctactgggggcatatcgagtttgagatgtcacagagacagccaactcaagtgtcaagttgggctttcatggggaggtcaggacaggagctacactttcaggaggtgggccttgtagatgacatctaaagcttgagcctggggctggctgccgtggctcacacctgtaaccccagcactttgggaggccgaggtgggcggatcacccgaggtcaggagtttgagaccagcctgaccaacatggagaaacccccacctctactaaaaatagaaaaattagctgggcatggtggcacgcatcggtggtcccaggtactcaggaggctgaggcagtcaaatctcttgaacccaggaggtggagattgtagtgagctgagatcgcgccactgcagtccagcctgggtgacagagcaagactccatctagaaggaaggaaggaaggaaggaaggagggagggagggaagggagggagggaggagggagggagaagaaagcttgagcctggatgaggtcacctggggagagaagagaaaggctctgggaccagagcttgaggtttgctaacatttagagagactcgggaaggactgcccacttagagcttctgagatgttaaatactgcaggactggggtcccaggcagaagcaacaggatgatggttggtgtttactgagcatgtgccatggggcaggctccatgccatgttccttacattcattgtcccacaggctaattcccccagcctccttattggtattgttaatatccccattttccagtgtggaccctgaaactgagaggttaaaaataataacagtaaatactcactttgtacttactgtatgccaggccccatcctacctatgtgatatattaattcatttaatccttgcaacaactctatgaggtaggtaccattattattttccctttacatatcagaaaactgaggctcagaggttaaataactggcactagtctagctcgtcaaggggcacagccgggagtctagcatctgtgcaatctcctaatcatttctgagactgcgtgtctaagggccctcagacttcgtccttggggtaaaggtatcaatccgcaggtctgcctctgtgttggggttcagcctgtgtgtctaaggctggggctgtacatctggcagttagactttgttcacactatgtccttaagtcagactgatttttaggtatcacagcatcgaattgacatttggagtctggcacactctgtgctaagccagtgacatcatggtgttgtcagggagtacagggtgtttcttgcactagtcacaggtctgcctttctgtagaaggtgggatctgagctccattaggattatccaggtgatccccctacccctagcccaggggcccccacatgagtatgaatgggagctgggggaagcaggttgagaggggagatgttaaatacaggcttcagagagccaccctgcttccatttctgaagtagctccttgtctgtagagaacccttcattaaccagggcctggctgaccagtgtcctctggaaacaccctgtctggacatctgaggagttcattttctcattctccagcaaacacataatgttctctctttaaagcacaagttatcacccgtggatggatttgtccttttctaaggaacaaagactaactccctccattccccttgttggagttatctccccttgaaaggacactccacagagccagaaattctagaacagggaaaagtggaggggacgtgcctgtgaactgcagggacagaaggaaatgggtattgggagaatggccagccctccaaggggctgatgtctggcctgggtatggagtcccacagaaaggggacctgtgatgcagcttacattgtcccgtgagggaaccatgatcctggaacccagatgaggccaaggaaatgttctctgaaaaagtcatatttgagctgagaactgaaggaactaactgggagaagggaggaaagagtgcttcaggcagaggaaacagcatgtgcaaaggccccaaggcagaaggaacaaaacacattagaaaattcagaagaagaagagtggcgtgggtgcaaagtggaggggagctggactttgggttttgtttgcttgtgcccaggctggagtgcagtggcaccaccttgggtcactacaacctccgcttcctgggttcaagcggattcttgtgcctcagcctgctgagtagctgggaatacaggcgtgtaccaccacactcagataattttttgtatttttagaagagttgggatttcaccctgttgaccatgctggtcttgaactcctggccttaagtgatcaggtctcaacttcccaaagtgttgggattacagccgtgagccaccgcacccacctggaaggtcataccacagatgtttgcctttatcccaacagcaatgggaagttgtgtgtgtgtgtgtgtgtgtgtgtgtgtgtgtgtgtgtgtgtggtttaacatgtttaacataaaatttatcatcttaactgtttttaagtatagtgttctgtggcattaagtatattcacagccgggcatggtggctcatgcctgtaatcccagcaccttggcaggccaaggcaggtgaattgcttgagctcagaagttcgagaccagcctggccaacatgccaaaaccccgtctctacaaaaaacataaaaattagctgggcgtggtaatgtacacctgtagttccagctacttgggaggctgaggtgggagtatcatgggaggctgaggagagaggatcagttgagcctggaaagtggaggctacagtgagccaagattgtgccactgcactccagccaagattgtgccactgcactccagcctggacaacagagtgagaccctgtctcaaaaaaagaaaaaaaaagtatattcacagtgctgtgtagccatcaccactatccatctccagaactttttcatcttcccaggttgaaactctgtactcattaaatgataactccccatttctccctccttacagcccctgacgaccaccattctactttctatctatgaatttgagcactctaggtacctcatctaagcggcatcatgcactgtctttttttttttttttttttttgagatggagtcttgctctgttgcccaggttggagtgcagtggtgcaatctcggctcaccgcaacctctgcttctctggttcaagcgattctcctgcctcagcctcctgagtaactgggactataggtacctgccaccacgcctggctaatttttgtatttttagtagagacggggtttcaccatattggctaggctggtctcaaactcctgatcttgtgatctgcccacctcggcctcccaaagtgctcggattacaggcgagagccaccttgcctggcctatttgtctttttatgacttgcttatttcactgagcataatgtcctcaaggttcatccatgttgtagcatgtattgaaatttccttcctttttaaggctaatattctactgtatggatatgccacattttgtttatctattcgtctgtcagtgggttgcttccacctcttgactcttgtaaatagcactgctatgaacatgggtgcattgaggggttttcgacataatcataataattgctttatggagaccagcttggaggagaacaagatggggaggaagtgtggaaaccaatgagaaggctctcagggtatagcgggaatacagaggacgcatgatgatgcctggacttaggtggtaccacagggatggagagaagtagatagagtcaagctatttaggacgtgaaatagacagcatttgttaatgggagaggtgtggggcgagggagaagaatagagggagaaggaggagtaatgggagctcaccagcagcccccatgttatgcctctttccttccttttccctcttctctcatcaggcattcagcttttgctgagtacttctgtgtctgacaacaggctgagcactcagcactgcaggacaggactatgcaaaaaacctctgggcctagtcctgggtgcactgctaattccctgtgtgaccttgcacaagacatccaagctctctgagcctcggattccccacctgggcaggaagagtaagtccctgcctaagtcatagggttgtaatgaagagcaaagcagaccatatctgttaagtgttagggacaagacaagcatgaggcatattttcaagtctcggctcctgtaggcagctctcactaagggctaaagggcttctgatgcctgggatagaatctgtccggcagagtggagtggaggcagggggacagccttcagctgtggaattcctccagtcctagagaccagcctgagctgggggacattattccagtcctgaggcatgagagcagaaggccgatgcttctgccctccatcctaatgtcctcctgcagggacccaaggtggatggcatcgatccccccgggtgagctcagccctgggcgcatggtggggcccaacatctcaacctgtttcctaaccctgagccaggcaggacagatcccagatttgtgcccaagagatgctctggcatccatgcccaggcccacatagggatagagggcagggtgaaagtctctctccctcactcgggtcctctggagaggggctctgtgtcatgaagctgaccttatccgcatctggtctaggagggaggagggaaggagctgccagtgctaaaatctcccccaccctcaaagggggacttcacaggttattgctggttttggttgttggaagctgacagtgatttattggcagattgaagtgagtgtgtgtgcgagaatttaggatagaatctactgatagcttctgaggtttaccttccccaggtcttaaatctggagataataaaaatataacagctaatgtccaaagagcacccgctgcgtgtgaggctcactgcactaaatgctttccatatgtttctcacaagaaccttctaggtagcactattatgattcccacttaatggatgaggaaactaagctctagaaggctaagtgactaatccaaggtcacacagctattatgtcacaggctctgagcccaggtgtatctggctgcggagccaccaccactaacccctgtataacgctgcctcacagaactgtggctggctctttccgtatcccccatgcccctgctccatcatcatgctgtggtgggctctgaactgtgaggacagggatccaggctttcaccctctctctgtccctagctgccagtgcacttgggcaaggtcacatcctatttctgggcctcagtttcctcatctgtaaaatgaaaggctggattgaatgacctttaagatttccctcacttggaaattccacaagtaagtcattatagcatggagcttgcatgcatgggctccagcgtcaggccagcccagctctgccagttaatgggtgtgtggccttggatctgttacctaacctttctgagcctcatttcctttgtctgagaaattgggggtgacggcagtgtactttctttgaaaagttatggtgaggaatagataagatcatgtgtttaaagtgcttacttggcacagtgcctgtaacttagttaaattcaataaataaatttcccattcttcccatgatcatttatttttaagggacatttgtctgaccagtttgatttatgagattattggtgtttttcatgaatgttaagacgtacgtgcgtcatcttagagtcatgtactctgatatattcacacgtgcacatccacttactcggaaatgtacacacccaggcacgcttattctgtctccttctctgccacatacttgcacacattatgtgagtgtacacacatgatgcacacacgtctctgcgatcttccatctctcctcggcagccctgctggtgtattggaccctggccttcatcaccaagaccatcaagtttgtcaagttcttggaccacgccatcggcttctcgcagctacgcttctgcctcacagggctgctggtgatcctctatgggatgctgctcctcgtggaggtcaatgtcatcagggtgagggtaagcaggccacctgggccagggtggggtgggaagcagaggctctggcctctgtcctgccctgggttcaggcccccaccctgcttctcagccaaactgagaagggatcagcttgttttacccgcccgtgtaaaggggagtggggccgtggcggaaatttcaggatagacactgcatctggcccacgtgtgctctaccccagggtcccagagggagaggggggtgatgggtgtgttcgctgaggttggcggatgactttccgtagaaagggaagataagcatcaggcactggcctctcctactttctttcttcgggggtgggggactttgctttaatgtattcatatcgtcacgctggtaaatgaatgagtaagtgttttgttttcctttctgtttgctcccgcctccctctctcttcctcaccccagactccaaccttccccttcccctgcccctacctccccaggcagcccagactaatgaactcgtttgtctttcccatgctttgtttttattagtataataccatatgtgtctgtctaaataaatacctattcaggttttttcctctcaacacaagtgaatatgtaggtttcccccacggtatttatcttgtaagaatgggatcatattatgcagttttctgcactgtgcttttctcacccaacaaatatctcttgggactccctccaagccatctgatatggctaattccgttttcttaatggctgcataatattccatcgtatggatgagccataatgtgttcagctatttctctatggatgggcatttactttgttgccaagttcttgccttcatgaataatggtgtgttgaacatacttatatatttatgtattgctgcttttatttctatgggagagagtccaaggaatggcgttgctgggtcaaagggtctgtgtattttaaattttgatcagtgttacatattgccttccagaaagactgtaatctgccagcaatgagtgagaaaaccctttccctgccttccaaccagcagtgagggctacagccctttcgaacttggactgcctgcatttctctgactcttctgcttttagttggtgatctgcagggcacaaagctccttatgtgtccccccatccagtgaccctcacaggaaccctgtgatgcaagcaccatcccctttatagatgaggaaacattttagatgaggcttgtccaaaaacaccttgctagtaagtggaggaggcaggattcaaaaccaggtctgcatgacttggagttctgtgaactgtatatgaaacatggtggtatccttagatctgtggagaagatagcatatgagagattcctgctcctccccaacccaacctaaacccaacccagcctagccatggggggttcaaagtcgacctcaatgagcagttacaaagtcaggatgccctgacattggtggccaagaagtgttggggaatccttttcctggtaataattacaggcgaaagatggccccatctgttagagatcaagtgtggaatatcacaaccccagatccttgctggggcaaggtagggagtggtgagaagttggacttacccatcccccatggcccatgtgccccacagagatacatcttcttcaagacaccgagggaggtgaagcctcccgaggacctgcaagacctgggggtacgcttcctgcagcccttcgtgaatctgctgtccaaaggcacctactggtggatgaacgccttcatcaagactgcccacaagaagcccatcgacttgcgagccatcgggaagctgcccatcgccatgagggccctcaccaactaccaacggctctgcgaggcctttgacgcccaggtggtcagtgggggcacagccacaccatctattcactgccttctggtttagggtcacagagagggacctcaaagggcattaggtcaaaatcctggtgggacaagaggggaaactgaggctggtgaggggaagaagcttgccttaagtcacacagtgaaccagggacaggtgcagggctgaggattcataggacaggcacagttggaatggcccttaccgtttaggtcgtctagtccaaagtccttatccagatggggaaactgaggctctgagaagggaagtgaccccactggactctcacatccctgtgctctttcctctgcagcttactgactataaaggttggagtgttcacttgatttggagcaggggtgttagtggcctgatccttatggtaactctatgagttgagccagacaggaatctccccatatcactgaggagcaaattgaggccctgagaaaggctgtgacctgcccagagctggccacagctggcaggcggcagaggcagtctcctggctcccagtccagtgctccttcacttcctctgccctcgcaccagggcagttgctgaggcagacacggtggcaggtggtaatgagtgagtgtggcacatggccacctcctcattccagtgctgtgctcatcacatagtccctgaccagctgtgtgaccttgagcaatcatctggccttagtttccccatctagaccatgttggtgttgatagggccctcccaactgtgcacttgctgattccatgatctcttcctggagttcacctatttgcagaggatgtgaccactgggtttccccagacaacaggagctaggggcatcctgggaggctaggcccagccgtgaattagccctcaggcactctgacctggccatggtctctctgggcagcggaaggacattcagggcactcaaggtgcccgggccatctggcaggcactcagccatgccttcgggaggcgcctggtcctcagcagcactttccgcatcttggccgacctgctgggcttcgccgggccactgtgcatctttgggatcgtggaccaccttgggaaggagaacgacgtcttccagcccaaggtaggcagccccaggggtagggtaaggcaccctctagatggttttcagttgtttctgagagtgcaacaggccaatgtgtgtgagccatggccacactggagtggctcctcacacatgcgcaaagcccatagcagtatccccaccacagaatactctacatctggtcaacagaaatgccagagggcgagcctatgccccaagggtatcctactctcctctcaccgtcactaccatagtacctctcccggtagttaggtcagtccgaaaactgcaggaagtgcttttgtttgtccagtgtctagagcttctgtgacttggatttgttggctttcagttcatgtcatcttagtaaactctttaaaagttttcaagatctgtcttcttcagtcctgtaaaggctggcacttgagctttctgcaggggcatcttgggagctactgtcagaggagagagaagtgggaaaccctcacgagtggagctttgtctctccccactccaaatttcattcaaagctgcccgtagttttattaatatgttggacttttccattaaaatttcttttttaagaaaagtttccatggcttaaaaaacactggagacttattagactagattatatccaatggccttggcagttgtaacgattctgcaaactgaaatttgttggagctagaaaacctttccccggggttatttgccctgcgtggggccgtagcatccacttcgggggctgggcagactgtgctctgttgtctgtttccttgcagccgtttaggtttaaatggccacaaaatgaaaactttttcacccctaataagtttcagagttttagtttccaagtgaggatgtcattataacattttaaccacagacagtctgaaaataatgcagagaatggggaattagggtttttaataatttatgacaccctttgcgtaacatttgttcatctcatgagctccaaaatcgcagccagcagttaatcctcaggaggtttatgttcatttttctggagacataattagtcagctgaacagttttggccacagatatgagatacgttgagtctgatttatgcagcaaactttcattgaacactgctgtgtgccaggcctgggttgggctgtgggaatatgaaagcaatagttatgatgaggatgattaacaatattaacagccacttactgaccacataatacatacctggctgtgtgcaggagttatccatgtgttatttaatccctaaaactatcctttggcgtgagtatattttgcaacatctttactgtggtatacctcaaatactgtacagtttatgagatgataggtattcttatccccattttacagatgagaaagttgaggctcagaaagtttaagtaattttccccagggtctctcagctagttaataacagaggcagaatttgaacacaagactcactccacagtctgggcatttacagccaggaagctaaattgactattattatcaagccatcacctctggctccaaggattatgaaatccaacagtgaggagagaaatcaaaataaaatacttttatgctatgtgttacatgtgactcttaggaggaatattcagggaattgtgggaaaagatagtgattaacttagccagtggtcatgaacagcttcatagaggaggggatgtttgaaaggggtcttgacggatgagtaggaatttgccaggctgccatgggaagatttcttgctcaaccaagaatgcaaggaccacttttgcttatttaaactttgatggcttttgaagccatatctggctttttgagcctctctactttacctggcccataaaagagaggggaagcggctgcttctcttgtctacaggagtgtcacctttggctctagcctgaccataggctaccccagaatacccccattggcgatcctgaagcagcatggagccagttgttaatatcagggggaaatggcacaggccagagcccttatcagagtgtccacaccacgctcttcttcctgtgtttcccaaaacccttgtgggattctgctaaggagagagctctgaggcaggacgtgccaaagagatggcgaaagcacttagaattttagttcatctgaacgttatcattgccgtttttttctctttgtttatacacaaaccctggggtttattaccgtctcattggaatgctcttgtcccagttacttagcacacaaatccctgagacagatggccctgcctcagtggcagtgggccttatcagatttaatattttttccctgcagcccaaacacaatcagaaaatttccgacacagaaacaagagttgaaagtaaatatagtctccagtgtccgcaacaaagaactctccatcatgtggttgcctgggatgtggcttaattctcatgtgggcttctgagctcagaaaatgggggaaagggatcatttactgagatcatttggttcatctcccagcccccaagccattctaatccagagagaaccgagtgctattctggtctttatgaatgacaaagaaggaagctccctagctacatgttgcagtgtttcacagtctgggagaggaagccgttttttctgcccagcctgaatccatcctgcagcagttggcacagcgaggcacctgtggtttattcatcatcactcttccttcctaagatactcagagttggcaagaaacatgtcatccttggtatccgcaaggacgaacatttctgatgtcctctttagttactgaaagtgtctgtgacttgccagatctttgatgctcctgtcaccccgctgccactccccagggaaagctgggacccaggttgggctctgcctatgatctatagctctttccagcctcctctccaacccaacccctactcccaatctgtcacctcccatggatgccactgatctggctgaaggacaagagaattagattcataatgagctgctggtgtctgaaacctgccagcactgccctgggctatcagttgagccaaaggaagaaggaacagtctgggtttgatcgaagggctaaagcttcaaacagcctctaagtctcagtaggaaaatgtgtaggtttgggagggtgtatgtgtttccgaatgagttcccctaagaactgcttatggttctatatgtgtgttctgtttgtccctgtgtcttttggtgtgtctttttctgcgtgtgtgtgtgcatgtgtgtgtgtctatgcccccgtttggattgccatatttgtggctatcattatgagtgacttaatgagtgtatatgcattggtgtttctgtgactttgtggttttgatgcatgggctggcctcttcataaccatgtccatgcagctggtctggcctagagtacctgccttcaattcactagctccttcttggccatcaagactctgctcaaatgtcacctgctccagggagccttcacctggttgaattagatgccccttatctgtgctcacataacatcctatcaaagcgccctgtttctttccctgacttgatcctctgtcccctattgcctgacctctgtgtgcccagcactcagcccactgcctgacacccaggagatgcacgggaaatggttctgcaaagaaggaataatgcagcaattactatatattgagtgcttacacttactgttttttcacatgcactgttacattgacttctcataacaactctctgaagtcccttcatagcctcaccttacagatgaggaaactgaagctaagagaggttgaggaacttacctaaggacacagtggctaatatatgatgagtcaggacctctaagtccaggctcttaaccaccgtgtcaaacagtcttgtatgaatgggtaggtgtgttggtctctgggtggccaaagataattttattctttacccagggcctcccggggctgggacctacggacaactcaccttttgacacctgccaaaataggaaacaagagtccaagtgatcccctctcctttaagcaccagagaacatgtgaaggggacctttccaatcatacctctggcctggcagagacaatggggctccaaactgtagagtcgggagtgctgggttttagtcctacctctgcagctaactcatttattctcctcagcagtcacattctgcaagcctcaaatgcaaaatgtgtaataacttctgtagaaagtacatgggggcatgaagatcattggcttgattgcttttaaaaaatcggtattgagcactactggggaaatccctggaaacaaacacaattcttccctgagagcttgtgaaaatgcaagactagggcctatgattttccaaagcattttcttccaccaagtgtcaggttgtaggtccttggtcttttctctcttgccttggtacctgcagggtgctgaccagtgctatcatatcccctccccgtttcctaggaccctcttctcggtagactccaacagggcctgccttccttgggcagcatggcaggcctcttggctagtctagtacccacttcttttttttttttttttttttttggatggagcctcactctgtctcccaggctggagtgcactggcgcaatcttagctcactgcaacctctgcctcctgggttcaagcaattctcctggcccagcctcccaagtagctgggattacaggcatgcatcaccatgtccagctatttttttgtatttttagtagaaacagggtttcagcatgttggccaggctggtctcaaactcccgacctcaggtgatctgcctacttcagcctcccaaaatgctggaattacaggcatgacccaccacgcctagtcaggtacccacttcttaactgaaacttagctattccaggttctatcccttttaaaccaactctttgaagagaggtctaataatgacccaatgacttatagctgcagtgagatttttattttaacaggtcacaaaattctcaatccacaaaagtagatttctgaccctaggttattttgttgggggcggagagaggaagtcaaaggttttgcagcctttagagctgcaaaaccagaatttgttgttttgttaaaaatgcacaaataccgacgagtatatttaagtaacacccatagtctaacgaacaaacatgatcagttggcttttccagccctcattctccagcctgtgtgttttctgctcattgtaacacagcgtgtgtgtggcattccatgtttctccagagctttcatgagaatcagtggtcttggatgcatagtgttcccatgagtaccttaattacctaaccattccctgtggttggaaatttatatgggtttttgcattctccttctgctctgaccccaaaataaatgtctgtgttcatacagctattaccttatgtgaaattattttctttgggataaattctcatgatgtgttgttgctttaaaatagtggactccagtctccagagctgcgtctctgcagaggacagtgggacagaagaatcccagggcatgttaaaaaggaccgggtcttcctaaacccacatgcctatatttctgacccagtaccagccaggggggcaagtttccatcccccacaagtcacaaacctgtaactgacactaggatgcttaaggtcaaaggcctggacgaggcctagacagtgggtctggggtagtgtttttgacatcactcaggttcatgttcacatgttgtccccttaccagcatgtgaccttgggccagccactaaccctactgaaactcctttttttcatgtatgaaatggggctaataatggtaccctcctcattagggtattgtgaggatagagttttgcacctgataaatattgtctcctgccccttcctcccctggaaattcaggtctctccctgcagcctaattttaaggcccatttttctgcttccagcccacccctgcccttctaccttcgacctcctccctctgcctctccctctggtgcactggcaaatgggacagagagcctcggtagggccttcctcttagagtcttgcacgcatccctcagtggtctccctgtggctgcttcctgctgccaccaacagatacagacccctgtcgcacagatcatggtagagacagtggtgagcaggaccagacagctccagggagcagtgagggctggcttagagaacctctgttaaactgagaggccaccatcaggaagctctgatccaagatccaggaatccctgactctagggaaaggcctccaatgagagcctgggccctctctgcctgattctgattgtggatgtgccctcaaactccttctcatcactttgttccatccctctttaccctgcagcagctcccacaccctgccaaacaggatgcacagtccagggcagtgtctgagaaagagcagagatctgtcttcatggaaatattgatgtggctctgctggggagcaatggatttatcaagatcaaagttttcctgggagttattgatgcttaatttggaaatagacacactgttgatccctggtatctttagcaacaaagttaaaatgtttgtttttcttcactggttgccatctgagatcttgccggaagtacacaagagaaccttaaatttaacaggaggccctgggagcccatgaggctggcgggcttgggtctgaaatcttttcagtctcttgtaagtgatgagctctcattctctcctgagagctctacggtgccatgttttccactggccttttctgctcagtaattgctacattacaggctgttggtaagttcggaacaagggagctgctgattccatttctgtagcagagaacatgcaccgtgagacttgttgtaccagttcaggttttaggtgctctatttattcttgccccattcagaatgctctcccctgggtctgtggccacaatgctaagagtcatatttatgggcctgcagttgtaattgggccccattctgttcccccaagtggaaagatgaacagggtgtaagcaaccttccctgtagttagaaaaacgtttagttggatttatcagtctgatttttcactcataaacaattgcacaagcctttgcaagcccagagggtcttgtaataatgatggccgtggtccattatggcacagtgatgtgttctacggtggtcattttgctggcaatgacagtcacctctgaacttctctttccaacagacacaatttctcggggtttactttgtctcatcccaagagttccttgccaatgcctacgtcttagctgtgcttctgttccttgccctcctactgcaaaggacatttctgcaagcatcctactatgtggccattgaaactggaattaacttgagaggagcaatacaggtacttggatgattattttttcactttgccataagaaccattattaggaataatgtccatgagtgttattcatcctcatggacactcaagaataattctgctgtaaatttattttttgttgcccattaacgatgttttaaaacagtaaccattgacaaggcagtgtgggatagtggaaaatatcttgggctgaacttgggagacagtgtagctctggctctggttctgccttggactgggtctgaaaatccagctgctcagcccttggcttgaaagtggtagacgtcactaattgatcacagcactctttctgaccaagggtaaatgcaaccttggaatcctctctaagtggctgttccagagttctgctaccagacagtcttctttgggtgtgaaaaaaggaatgtgcttgacatacaaggtctagatagcctctaagacagggtcccctctaagatggggtattggtccatggcctgttaggaactgagccacacatcaggaggtaagcagtgggagcaagcattactacctgagctctgcctcctgtcagatcagcggctacattagactctcataggagtgcgaaccctattgtgaactgtgcaggcaagggtctaggttgtgtgttccttatgagaatctaatgcctgatgatctgaagtggaacagtttcatcctgaaaccatccctctcccccaggtccatggaaaaattgtcttccacgaaaccagtccctggtgccaaaaaggttgaggaccactgctctaagttctatttgaacccttaagtcttgctcactaatgagagtgacctatttggtctgttgggtcacttaagtctaggctcttggtcctgccttctgtgatttccttcttagagtttctggaaagatgatcaaagccagggagtgttcagggcccctctgaagaaggtgatgatgagagttgtccaagtcccagggtcttcactaggattttggttcagctatcagactagagagacatcctgattgagagtagtttaaatgggatagaagtttgtttattcttcagatagagtcagggctgacacaggagctactcaatgatcagagacctggcttcttctgtcatgttgctctgccagccttcttttgtgacttttgtctccatagccatggtgggtattgaaactgccactatatttacatttaaactagccagaagaagggacaagaggagggaacgcattttccttttaaaatggtaatacctgatttgcacataccctctcgcatcccattggtgagaaagtggccaaatggccgtatctagagagtctagaaagagcttggtctttattcttgacagctatatatgcactgctagaaattctctgtgcaaagaggagaatgggcattgggaataactagatgcagctatgcctagtgatgtccatgaagttgtggtaaaatcctgaagctaccttgttctttggaaatgttcctcagaatcattaacattagtcatgtgggagacaggagaagaagctctgcagaaaagggaccgagaggacaaggatatagcttgggctggggacaatgtcagagtccaaactctggctatcttggaatagtctgtgtgaacggtgccctcccaagttgtgcagtgcacaacctgtgcagctatatatggcaaccctgcccatccccagtggtttctcactgggaaagcagagtatttcctcagggatgtcattatgtgacaatagtggaaaaagcccaggaaaatctaagaccttctaagactcatgggggcccagagctgggaggaaccaagctgttgctcagttcagaaaacttctctagaaatcccagcctctcctcacacccctccagtgacaggcagacttgcaccaccacaagcaacagccacttttgtggttgggcagttttgtaattaaatatactaatgtgtgtatgtcataaattacattttccaattatgccaaaagagccaaaaatggttttttaatggttagcatataatcgtttttatcaaattgcttgaatctttcatgttaataagagagattcattactatgccacaaaaagcaaatactggcattaattatagaaacaaattaggggggtggagcgcaatggctcatgactgtaatcccagcgctttgggaggctgaggcgggtggatcacaaggtcagaagtttgagaccagcctgaccaacatagtgaaaccccatctctactaaaaatacaaaaattagccaggcatgttggcgtgcacctgtagtcccagctactcaggaggctgaggcaggagaatcgcttgaacccagcaggtggaggttgcagtgagctgagatcgtgccactatactccagcttgggcgacagagtgagacttcatctcaaaaaaaaaaaaaaaaaaaaagtggctcatgcctgtaatcccagcactttgggaggccaaggcgggtggatcacaaggtcaggagatcgagaccatcctggctaacatggtgaaaccccgtctctactaaaaatacaaaaaaaaattagccaggcatggtggcgggtgcctgtagtcccagctactcgggaggctgaggcaggagaatggcgtgaacccaggaggaggagcttgcagtgagccgagatggcaccaccgcactccagcctgggcgacacagcaagactctgaaaaaaaaaaaaaggaaagaaagaaggaaaggaaaggaaagaaaggaaaggaaaggaaggaaagaaagaaagaaaggaaagagagagagagaaagaaagaaagaaagaaagaaagaaagaaagaaagaaagaaagaaagaaagaaagaaagaaagagaaagaaagaaagaaaaagaaaagaaaggagttagggagaaaaaaaccctttctttctttcttttggagatttccggaaaatgtacccttacggatgagagcctgtgtcttcatgggttagagaataaccacgctttgtgcataaaaagttattaagcacaattcctgaattatacataattactagctgtcagtcagttgtgcatttctgtgtatgctggtcttcacttaataagactttatttcacagatcacttggtgtccctacttcactgaaactaggtgattatcttttgaagtctcatttcacataacctaggaggtatatagatttctttaaaaatgtcattgccattattttaaaccttacccatggtatatataaacttacagaaagacagaataggttcattattttaaaccttgcccatggtgtatattagctcacagaaagacatagaataggttcctgccttaagaaaacctgacccacaaaaaagcctgggtttacacaaaagaggaattaagggcggggagcccaccttacaacagaatgaataatagaattttatccaagagcaggcatcctgaggacatttaagacccggatgcatttttccttgttcaagagcacacatccaaaaattgcagtctttctgcgagtcatgatcactctgcacataaagcgtttaggttcagagctcggggaggccattaccatggctgctctctgtctgccctgtgagggtccttggggtggctgcactctggggatggtgctggggctgactgactcacgcggtcgtgtaacacatcagaccttccaaagtcgaacccttgttttgtttcaaggctcaattatgacaggacttggtctcagagcagatcccctccctaggctggagaaggccactttaaaacagatggcctgccccacttcatcatttttatggctctgatctgtgttctccactggcctctggtaaatcaagaatacaagtggacatgaagatctgctttaaaaaataaagaacagaccgggtgcggtggctcatgcctgtaatctcagcatttggaggccgaggtggatggatctcctgaggtcaggagtttgagaccagcctggccaacatggcaaaaccccatctctgctaaaaatataaaaattagctgggcatggtaggcacgtgcctataattccagctactccggaggctgaggcatgagaattgcttgaacccggaaggtggaggctgcagtgagctgagatcatgccacttcactccagcctgggaagcagagcgagactctgtctctaaataaataagtaaatgaattaaattaaataaaaataaagaaccaattaagtcctgtctacaggaaaaggccttacttgctggagaagtagcttgctgtgctggagtagactagtaagttggaacggtgatacagtaccaccttacagagctgctctagggcaccatggggactgtctgagaagcccctggcacactgtaacaggtggcatctggtgtggtgatgatgatgagaatgatgatgaatgtgaaacactctgctctcatttctagaccaagatttacaataaaattatgcacctgtccacctccaacctgtccatgggagaaatgactgctggacagatctgtaatctggttgccatcgacaccaatcagctcatgtggtttttcttcttgtgcccaaacctctgggctatgccagtacaggtactagatgggctgaggggaagggaggggggcagcaggacacacaaccagaatctgctggtccatggccagtaactaggagcacaccgtcttccactccatgcttgcctgtacctttcacacacttggctataccacaggctgtacctctgggtccctcctgtcccatactctgcaagcactgaccatctctcttaatgaccagagaaggcagtatcattaagactttaaaaatggagccaactttataaactatagaaaaatcaagccaggttcaggggctcacacctgtaatcccagcactttgggaggctgaggcaggaagattacatgagcacaggagttcaagactggcctgggcaacacagtgagaccccttctatgcagaaaaaaaaaagaagaaagaaaagaaaaatcgtacatggaatgcccacagatcttaaaagctatgttgtagcaaaatatttaattacatcaaaaagtgttagtgatgtatttttaagcaaaaagagtaagttacaaatagtatatgttgtatgcttactactaaactggaatatatgttatgtatacatttgtacagattcacacatgaaaaagaattggaaaatcacatagtgggattataagtgatttttattttctttatgtgtttctaaattctctaataagcgtgtataagatttggaaatcaacaacatgatacttttagcctaggcaacaaagtgagaccctgtctgtacaaaaaattagctggaagtggtggctcacaactatagccccagctactcagaggctgaggtgggaagattacctaaagtccaggaggcagaggttgcagtgagctacaatcacaccactgcactccagcctgggcgatagagtgacaccttgtctcaaaaacaaacaaaacctggtgttttttagccagatgtggtggtgcgcccctttagtcccagctacctgggagtctgagatggaaggattgcttgaccccaggagttcaaggctgcagtgagcaatgatcacgcccctgcacttcagcctggacaacagagagactcctgtctcttaaaaaataaaaataaaaacgttaaaacatggtatttttttaaagcaagacaacctttggtgctggctcaggaagaggtacattaccccccaataatcagaggagaatcgtcagcatgattgatctgacctcgggcttcatgtgtcccatctcccacccggagctcttccaccacagagtctgatcctgtcctatgcctgggactaaatcttcaccctggtgttcaggccagaaaccgaaatcccagacccattcccagagggcgggaaggttccaccgggagagcttgatgtagcagaaagtgacttgggtgagacaggctgattcaaatacttaacctctctgagccttggtttctttatctatgaaatggggaggctgcccaccctctggagttgctatggcaattcagttagataatgtaagtaacacagcaggcagagtggcccccagagtcttcacttcgtaaatatcagatccctctaccttgcacatgtttggtatgagtgaggtgttaccaatccagaatccattgcttcttgggataaagattccataaaccttcatctccagtgatttgtattggtcctccttacttgtaaagcttagagtttaaaaatattaaaagaaaaaaaggggagaggctcccacagggacacagctagacaagatgagatgcagggaatctgatgttcttttttatgggaacagtcatatatgccatcccccattaccacctacccatgcccagactgcccccgctccattctgccaagacagatcaatgactataaaagctacaaaagggcctggagatctcatctagtttagttaccaaccaaccttttatgcacaagactttctaagctgggtgtggtggctcatgcctgtagtctcagccactcaaaaggctgaggtaggaggatggcttgagcccaagagttcgagtccagcctgggcaacatagagagacctcatctctaacacaattttttttttgaaacatgaaaaatgaagatttctgaccatgcttctctcattagttaacactttgggctgtgagggtctgatgcagagagacacagcctgggaggatcctaacatgtacacagcattcaaaaggctacaagacactttctgttgtgtccccttgaacaagcagtttgtaagattttgttggccaggcatggtggctcgctcctgtaatcccagcactttgggaggctgaggctgatggttcacctgaggtcaggagttcgagaccagcctgaccaatatggtgaaaccccgtctctactaaaaatacaaaaattagccgggcatgatggcgtgtgcctgtagtctcagctactccggaggctgagacaggagaattgcttgagcccaggaggcggagactgtggtgagctgagatcgtgtcactgcgttccagcctgggtaacagagcgagactcggtctaaaaaaaaaaaaaaaaaagaaatcaggttttgtctactaaacctgctgcacggttaccgttactagtactcacagggtttgttgcacatgcatcgttgctaatagtgctaactaatattaacagcccttgccctatgcctggccctgtcccagcccccctcccttgtataatttaacccttgcactgggggtagagattttcatatctactgatttcttacctttgctcatttatcatggagtgtcctttggttttctgtgtttgtatatacctttaccacttatagatttgaccagcactcaagaaccagtgttactcctgggagttaatacaatcccagccccatggcaaagaaactcatgtggttaggattctgtgtgcagcctggttagccacagggcacgtaaggctttttataatattgacatgagtgcagaagccccattcccgtgtaagccctgagggctcttgtttcataatctttttttggtcacatgcacacagctttattgagatataacccactcatttaaagcatacaaatcagtgggttttagtgtcctatattcacagagctgtgcagccatcatcacaaatgtggaagttttcatttccccaaaaagaaacccgtacccattggcagtcactcctcatcttcgcccccagcccttggccaccgtttatctacacatacttttgaaaggctagtgaaactttctcagaaaaataaatgcttgctcaaacatttgggctataatttcaggggcttcatgggtgcccccctgacatttatcaagaacaccaggttaaggaatttagctataatggaggcctctgtgtttcccagtctcctgggtatcagaggcccagagagggcaggtgccttaccctgggccacgcagtgaaccagtggcagcaccatactcacacatctcctttctgcggttccccagtgacagagttctcaggaagctttttcatttattttctgagaggagggtaggccatcttgtattgatctccaactatatgccagccacaattctaggtgcttatcataaaggttcatttaatcttcacaatagtcctgcagagtggacagagtccttcagagtgggcattataatcaccattttaaagatggagaagctgaaaaccagagaggttaagtaactcacccaagactgcacagcaaaaggctggggctttgaaactcagggccacagactccaaagactatgtcctccccactatgctagatttttttcctaacctgtgaataggagacaaaatagtccttttatttctcacagttgctttgcacactcagaatccatgatttcttctgcatgagggccattcagacctgtgcagaagagagtaatggaccaaggagtcttgggagcacctaggaggaggggatgggggagcatgaggaggagccagggaacagcagcagctgcagcaccagctcccaccccagcctctgccagtctcttggaggtggtgtgggtgcagacaccggctcacaaggtgccctgttagtgagcttggggtgccatgggagccttcttgttgtcaggcccaacccaagctggctgaagaacaccctgatggcctccatttgagcacaactaatgaaggactggatgccagagataagtccaggagggtgatgctgcagggcaggccagggaagagggtacttcatctctatcatggtcctctgcccatccatgccagcatctaacacctgttaaacactgggaggcaggtggtgaaggggccacttcccagcctctaagatacctcctaagccaggaggcattctgtgattaaattacagggcctcccacttactcctttatccttgaggcggtgctggaagcttaatgccaatctggtgtagggctctgggactacaggaccaaggcaagcagtcctttctctctctctctctctttttagctaaggaagccagcacatctgttctttgagaaaaagccctgtatttagaggtgtctgcctttgaaggcaacctgagaaactgtcatcttggcgctttggggactggccatttacacttctcataaatattcagaagtaggcagtcatttacataaagctaaatgcagaaggaattctcttttcagggaatacctggcagattcattaaaaaaattaaagaaaccaagagcataagaatgaaaagcgaattctcggaccccaggctggttttttctggcatgggtgcagtaactttgcctctttgctcagttatcacttttttccaatgacagtaaccataagccctgagagccagcaaatagaacaaaaggtgctgtcacaaacattgtgcaatctcatctctgagatttccatctggaaaatagactggagagagttaaggcttcaaccagccttgcagataaatgcagttagttaccagcccagcaaccctctgcttgcatgagagcccattatgctaacctccttttgaaattgctttgtttctcctccttccctgcactccactccccaagataatttggaaacctgggcaccaaggcttgtcccactctaggggactggggaaacagggattttgccagcacctcctggcagggcaaccatcaggtcaaagggacctgacccatgaccccttcctcagatcattgtgggtgtgattctcctctactacatactcggagtcagtgccttaattggagcagctgtcatcattctactggctcctgtccagtacttcgtggccaccaagctgtctcaggcccagcggagcacactggtgagtgcccaaaggtgtgtgtgttttgtccctcttcccctccttccctcgacagcagcaggtctcctcccacacacccacactgtcattgactttgactttgactttgagtaggccacttcacctgtccaggcctcagcttctttgtctgggaaatggagtcaatgggggaggaggctgcctcccggtgaggacaggaggcgggcatggcagtgacagtattgacactcaggccttcctctcgggtgggagacggagcagaagcctctcccctctgactcggggacccctgcaggagtattccaatgagcggctgaagcagaccaacgagatgctccgcggcatcaagctgctgaagctgtacgcctgggagaacatcttccgcacgcgggtggagacgacccgcaggaaggagatgaccagcctcagggcctttgccatctatacctccatctccagtgagttcaccccacacagccagccctgggtgctgctgcgtacatgcaaggagagggtgtcagagctcgggtaagagggggtgcagggacagaagcaggaggccttgagattatccgactcagtaggggagcctcaaactggctctgatagctaagctcccagaaatcaaagtactcttcattcatttatccaacaaacatgcatggaaagcctgctatgtgctggacactgtgctggccctcaggatacagtgatgaggaagagagatgaagtttcattcctcatggaactgatatgttattgacagacagcagcaagtaagtaaatgaccacagttttgaactctcctaagaatgaagactttttagtaagtcagactgagctgtcattgccctggggaagctacaagaaagcttccatccacttggggctatgcaaaagaaaaagactagttatccttaaatatcagaagcccaggctgaaggtactcacaggtgtagggactgaatttatattaaccaagtagtttgggaaccccaagccaaggaagaagaaaaagaccaaaactggtaaaagtcctagagtcccatatacttgaaaccattttactgagaatgtaaaacttttttttctttttttgagatggagtctcgctctgtcacccaggctggagtgcagtggcaaaatctcggctcactgcaacctccacatcccaggttcaagtgattctcctgcctcagcctcccatgtagctgggactacaggcacacaccaccacacccgactaatttttgtatttttagtagagacagagtttcaccatattggccaggctagtcttgaactcctgacctcgtgatccacccgcctcagcctcccaaagtgctggaattacatgcatgagccactgtgcccagcccaaaagattttttagaaattgaaattttagttatggaaattaattcagtgaacaatggtcccctggtcagagtgagggcttacggaggtcaggtgatccatggagtcctggcccaagtttatctcacagttggtctcgtggctccgtggacccatcccatggtggttacttcccaagtgcataattgggatgtagatatttagcaaccagctgacttcacactagttccctgacctgtccagtctaagagtcattatggccaagtggaagcccctggaaagaagaaaacaaaaaagaaaccaaaacttactcagtgcacaggttacatgaatgagtatagctgaagagagaatttttgaattagaagacagatgagtggggattacacagaacgtggcaaggagagtaagttggtagaaccattttacagatgggaaattaaggccagaggggagtgtgttcctgagatccctcctgaggttagtagcatggctcggactagatcctccaaagtctcttaactcctggtctcaggctattttccacaaagagctgggggcctctgtggggtgaagaagacttaggacaccatggggcaccattatgaggccatttcctcctaggagaaaaaaaatctctgggctctgaaaggagtagaattagggtaggaaattaagagaggctaccgaccacctcctccaactaaaattggttcttttggtgccaggaagagacacacctggtgggggagggaaggtggtaatggagggggtgctggtagtgtctcccagatagacccatccaacaagtctcatggagaatgagacggtcactcaggtcatctgcgtattcttggcattcttgctgcctagagagagagtctgatggagctaggtggccaccaagctgtcccactccccaagacagtttggaaacatgggcaccaaggcatgtccctgtctaggggactggggaaatatcccatagcagtgttctcacagtatggggctggccatgaataccccaggagtccaacctccctttgtccagctagaccatggtgtcctatgcctcaggcagggaatgtggtccagtcatcagtggctgggccgtctgccatacatggtgcaagccatggcgttttatgcagaaagtcctgctagcatttgattttctcagaatggagctgtgagcatggcaggcaaccactgtttcctggattcttcaccaagacaccccaagttcctggtctctccccgttatcctcatccctgaccctgtggttctcagagcctccaaacacactcaggctaagcactccatagacaggggaaatttggaaggaacatctagggagctcagaaaagccaatgtccctagccccaggcccacttcaaccttctctctgtcagtcctgcctgcccctggaggctggttacatgaagagtaaccccctgcttgtgtatagccccccagttttgtacaggtttagagacagttcccagcagtaggaacagctgccgaggtgggagagggcttctcccgatagccgggggacttcctctcccaggaacaacagggtggggtagagcaggcttgtcgttgctgagatagagagagggaagggaaacaacaaggaaagtgggggcactgggtccccaaggttcctggcacagcaagcagtgaagttggggcagcctcaggtcatgtagtgggggcaggtgacatctgctttgactgctcctaagagatatgtactcatctcctggattccaaactgcagcctgggacatgttttcttatataaacagcatcaaaagatgtgtgagttcccaggctagcccactgaaccctacctagtgggtgctcattgtcccccagagcccccagaagacaagccgtggctttgtgatgggcctggggccaggaggacctagggatatgttgtgaagagctgagaagactctggaaaaaaggggctctggagccaagcaggagcccgcccaggactcctcacgtgtccaagtcacctagggagagaaacagagcagcccaggttggtccctggaagagagcagcggaggaggggaaaggggagagcccctggggagagctttgaaagtcaagtgctgtttgctcagtgtgtttgcctttccgaggatgtgtttttttttccctccgttagtcagcagtgggagggggagagagacgggtggtagggtgcagggtacctcctggctgcaggcatatgctttgagtgcgtgttcatttacctcctctggacttcctgccttctgttaccagggatcaagacacaggtcattaggcgtgaggtaatggggcatctcttgttctgacccctggcgccagtcttggagtcctgacgctgcagaggagccccagagtcacatttcctgttggggcccatcctgctcatatgcggcaccatcagacttctgggcaggcaagattacctgtgactctgtctgatggtctcgccatcaatatcactgagagtagctgtgtatggagtcccgaactggtacaggataaaacagggggctgaaaagggaatgaatgggcacagtttctctggcatcaaaagtcacatccagaattgatatttcctgttgagtaaaaatagaaatataagttgctcagtggatgttgagtgagccctattcatgtgccccactctgtgccaagcaccaggaaggagggaagggaaaaatgataagatgttctccccgttctccaggagtttatgctccactaagaagtcagagctaacatgcacagaacagtgtggcagcgagagcagaaccgtgtggccagctccatgcttgccgcctagcaagcgtgattgcacttcatcctcataacaacttggtgaggtgtgttgctctgttgtcccattttacagcagagaggactgactctcagtgaattgaaatgtctcagtgaggtcttccacagcaaaaggcgaagcacagagaaggaagtccatgtgggctgggagttcacccagagattcatgtaggggcaatgtgggctgtaccttgcaagatggtgggatttcaatgaggagaagacaaagtgggaggaagctggagacaaggactgtggtctcttcctttagaagtcagttcaatctttttttccttgtggaagcagcataactctaggtggttcctctgtatctgaggacaagctttgtagaggtgacaaaggggtcctaggtcctatcaggcaagcactcgatatgctgccagttcattctgtccattgtgagatacccattccagagcgcttcctctgtgccaggctctacggaggttctggatgttaaagaggaagcaggcatggccctggccctcccagtcttgtgggagattgatcatgcccatgaatagtgaccatgtggtcagagccacagggtcaattccaaatgcccctgtttctcttttgtgttactcacctgactctgggtctttcgtttcttccattcattttttttaaacaaatatttcctgcccaccttctgtgtgccaggcctggggatgcagtgggagaagcctctgtcctcctcagtggaggcgctaactcagaacaggcagtggagaaaaacaacatgacctggagacctggtgccccttccttccccagcatctttgaaattcttttggttgttgttgttttgagatggagtctcactctgttgtcaggctggagtgcagtggcgcgatctcaactcactgcaacctctgcctcccaggttcaagtaattctccctgcctcagcctcccaagtagctgggattacaggtgctctctaccatgcccagtaatattttttgtatttttagtagagacagggtttcgccatgttggccagcctggtctcaaactcctgacctcaggtgatccacctgccttggcctcccaaaatgctgggattacaagcatgagccactgtgcctggcctgaaattcttcaatatctacctgcccttctgccagttggtgcagccacagtgggctgcttatgcatatcctggcctggcttggtggggagcatggctgagggagagccggggcacccatcaattaaggaggtaaagatcagtctgactgagatgcctcctgccacacttcctcagctgccagcaactgacaccattaacctgatttccttccccctctgttgactgcactgactattggactgaatgggaaacagccccgtgcacctcaaaatgcacttcccctcctgcagatgcatcttgcaattaggcccaaactgtgagcctgcatgctcctcccctggccctgcacaggcaacaaagctgaagttaatcagaggtacaaatggctggctatgcctctctgacacgtaacttctggaacatgtatcaatgctttggaaatgaaaagctcctggtattgcaatgccaggctggtgcccataagggccagaaaacattccttgggcaaagccagggggagtgggtgatctgatcccagctcaggtttgttgatttgttgttttgtttgtttcgttttgtatggggcaagggttgagggtatgaaaaacttacactatcatttactaccgtagtccccagaacccagcacaccagcacaaggcctggaacagggataccttttttgaatgaataagtctttttttttttttttttttttttttttgagacagagtttcactcttgttgcccaggctggagtgcagtggcgcgatctcggctcactgcaacctccgcctcctgggttcaagcgattctcctgcctcagcctctcgagtagctaggattacaggtatgcgccaccacgcctggctaatattttggtatttttagtagagatggggtttcaccatgttggccaggctggtctcaaactcctgacctcaggtgatccacccaccttggcctcccagagtgctgggattacaggcgtgagccactgtgcccagccttgaatggataagtcttaagggatatttttggaaaggatattctaaaaaatacccatgtctctacactattgcagaagggctttcagttttgatggcagcctttcaggccagcctacacgcaactaaacttttccataacagcatcacacttacacaagaagaaggttttataatccacttgccattatttaacatagttcttcctccttaactttcaagatctgagcactataatgttcttctttttgtttttgtttttttctaaatcaaattaaggtgagtcacctcaccttgggcctgagttggacagaaatctattcttggctatattccccacccctccaccaccttggaaccttatagaactttatgtggttcaggaaaatgagggcgaggcctcagatcttcaacccatgacagctgtatgcccagctccctgccttcctgtcttacccccagctagggcacaggactgactattgtgcccagagaggtgccagagcctgtaacaaccccagacttcccaggtccagccacatccaccccagagccccaaaagatgatcttcagagagacctttaaaacacaagtagctggtcacttccatccagaccagaacccaagatggctgtgctcttgctgagacatgttggttgtcattgcctccgagcccactttagccctcagctctgtaccagaaatgctgttcctttgggaatcacagccaaagaagagatggagcagttctggaataagaacacaagttcaaactgtcccatatctccccacatcactatctacagttggtctcttcccatggcgatgtccatctgccaccgtggcactggtattgctttgagtgcaggggtctctctttttggcatgttggccctgttactccctgggaactttgagtcttatttggaatgcgtgaagtccctgtgtccggggccagcactgatccacacagctaagtttgcactcatcttccctctcatgtatcatatctggaatggggtctgacacttgatgtgggacctaggaaaaggcctgaagattccccagctataccaatctggagtggttgtcccggttcttactgtactgtcctctgtagggctggcagccatgtgaagaacagaggttcccagcatcatcttcctacacattattacattcacccatctttctgtttctcacttttatctccagcctgggaaaagttctccttatttgtttaaatccttttgtgcttttagatccccttggagcagtagagtaccttgtagaccataagagtggaaaagggtctagttttctccttgtttctaaagatggggtggctgaaaaaactccccttttttgcctacagcttgcctctctgggcctagaagtggttattctgtctccatattggcctttgatttgtgctgagggtcagcttttggctccttcttcctgagacagtggaaacaatgccagctgtgtggcttctgccctgggggctgggggtgaggctttgggtgccactgcctgtgggttgctggcttaaaggacaattctgttcattggtgagagcccaggccattaacacctacgcagtgttattgaaagaagagaggcgggggtggaggggaattagtctatcccagctagagggagataaagagggctagttagttcttggagcagctgctttgaggagaaaatgtatagcttttgacacaacaggaagatccagaaaattatcattgaacatattaaaggttatttctttttcttgcaaaacacacacacacacacacacacacacacacacacgcgaacacacgcagctgatgattctactctcccagccccagccctgaaggggacccagaactccctgcacaaaggctgtccttcaaggggagggtgaaagaagtggaaaatcacattttcattctttagcgtctccatacaacagccagaactgggcagaagctaattatatcagaagcatactccatgttgctgcatcagctttgggatgttcatttttaaatttatttatagcttgtctcattcctcaaaggagttcagggagctacaaaaataaagacaataaaattgaaaaaaattaaattaaaaaaaccatgaccagggaaaatgtgcagtagaatgaagtgtcaattatcacgttttctgactgcaaaatctcccccacggctgatgcaccatcatttactacaacagcccctcttgttggacatttccagtttatttcgtttgggatggtttgttgctgttgctgtggttgtggttttgttttattgaattttgtgttagctgcagctaataccatcttgctgatggctttgcgctgctcttgaatgattactcaggataaatttcctggagacggattataggatcagaaggtctgaacttctgtgtggctctagctacaaagcaccagattgctttccaagagcgttgtagcaatttataatccaacactcagcctattttttggctgggagtcaagccccagaatgtgaaggaggggtcttggcctggagcaggggctgagggatgggtgcacaggacccctccttattggttatttatggggatgggccaggaggagcagaatagaggcccctgccctcccagttgctccttggagtgactgaccccataggggaggggcgaggctacctcacatttagaactatgtagttggtgatggtcaaggtcctaggtctgatgggcatcctcctccctctcctcctcagccagtaatggctgcactatgtcgtatgtcctagatctgggtcccttttgctgtgggaacaccaataatacttacgctgtttcctgccggaaacggtgcaggagggctgtggcatggtagtgggccctggaaaccatctagccttcatgaggaagggcagttaaagcacaggcatgtatgatgttggtattgattaaaagcctcacgggcagagaaattcgccatctgccagggccccagccatacgagggctccagccatacatcctccaggagactgggacctctccaattgcaggagccttgccttccccatcagattaggaattccccgaggatggggacaatgtccttcccacctgcttgagaactcctaaggggcatgtactctgtctccccattgtatctggaacttcctgggagcatagctcctgtctccgtcctcagactgggaatcccctaagggcagaggccatgtccttccacccacttgggattccctgaagttggggaccacatctctgatgtacaatgctttgtatgtactgactgctgcaggattcttggagtaaatgggcagtcaacttcttggactggtattgaccatctggacttcatcagagtgtccaagactttgccattcattagacaggggccatgtgcacaggcagagccctggcctctggcttctggctcctgactcctggtccctctgctttaatttggctaatggcagaaccagactcctttctgggctgccctggaaggggatccttgaatgaaagaggatagatgggaaggtggcagctgacatggttacctcttatgccatgggggggctgctctctctggaaatttaggcctggggtcagggcactgttgagcattttacaccctaggccagaggaggggtgacctgtggagcagggctaagctagtagcccatgaggtatgatgtgtaggcagcacctggggctcacagagcctgttacccatgttatctcctctgaccttggaaagagctggggtgtatgaacaagtatttataagtttacaaaaatcatatgaggaaactgaggcacggggaaggtaaatgacatgccctaggttacacagcttataagtagcagggattctgcccttctgtcacaccaagtcccactgtcttttcttcctggagtccctgtgactgatctaaaggccacatgtttaacagaataaggaggaggcctctgttgcagcaaaccagctaccccacccgcacacagactctaagggacatcctgctttaagctgtccttagttactaatacctcagtgagaatgagtttgaaattttctcaagagccatgggagactaggaagtctctaagcttcatagagagcctggcttggggggacacaggagccaaaggcagaggaagaagtggcagctttgtgcccccagaaacacgtgctcctgacctcacagttggccacagccagccaactctcccatccttctcccaccactttcccgtggggctaacttcaccctgtccacacggagtgacttaacagtttaagccccagagtcgggggccggggtacctgggacaagagtcctgagggaaatggggtgaggaactggaagtgccacagggctagagttctgcccctagcctactggagctgtgccccacaggctggccccactggactgcgctgcctccaagccatcctgggcatctccatgtgtagctgtcacgctcctcccactaaacgcctccctgtgcttcctctgcagttttcatgaacacggccatccccattgcagctgtcctcatagtaagtggatcctttctccatctcttgggggtagggtggagggggagggcgtctgcagtgacaggctgcccagatttggcctttctgcacaggggcctcagaagacaggctccacagccagactgaaaataggatcgaaagtttatagagggtgtggcccctccccaactccagccgaacaggggcctctgcctccaggcctggaagaccggaggcttagtatttagagaaattaaactttcttttaaaaaatagctatccaaatttttaatttttaaagtgaaacatgtgtattgtagaagtgatgggaaatccagaacagaaagctcaaagagaattaaaatcacccataatcccactggtaacatttttaatgtgtttctttccagtctttttttaaggcctatgatatgtcattttctacaaaaataggaatgtgctatgcatgcagttttgcaacctgctcttttaaatttaggaatatgccacacacaattctccatgccactgaatattatgatggtggctttctaaagcaattttgataaaagctgtgtgtgagctgagccatgggggtcaagcagcatgctcctacagaaaggcctgggcccctacgagcctgcagccccctcacccagcctcccatccccatcttctgtgatggctgcagttccttaaaaagatctgcttatttcccccggggccagtgtccctgagctgtgtagagttcacagcctgtcggatacacttgggaattcacttccaatgtgatgtattgagctggttcctggcctggctcctgggggaactgtgggtaacagaggccactgagccagccaggtggctggggcaaagcactgtgcagtttcgtaatcactctgtttacgttatcccgatgaggactggggagatgagcaccccgcctgctgtctgcagagggggccgtgctgacctaacccgagatctcctccctgcttattcccagccaagactgggcaggacagggagtcttggccaggacagggagggagcagcccctgctctccagcttgaagtcctgaacttgttggggacgtttccatgagatgactgtggggatgatgaaggtgtctccaactaaaagatcctcttaggagcctgctccctgacagccctctcatttcccttccagtgctgagcgtttccagtgtgggagggacccacaccctgggccaccctggcctcacttgtgcctctgtccacagactttcgtgggccacgtcagcttcttcaaagaggccgacttctcgccctccgtggcctttgcctccctctccctcttccatatcttggtcacaccgctgttcctgctgtccagtgtggtccgatctaccgtcaaagctctagtgaggtgaggggagggtccgggcgagggcactgggcaggcaggtcctgtgtcagcctcaaggcttgctcgagtgatggccaaaccacagctgtttggtcccggaacacacccccattgctgggccttgctgtagctggtcctggttggtcagagggacattggcctgtatggtttcccagctcgccatccctgagcaaggacttgcttacatacctcccaggagaggggactcactgtcactttcacgacaacttaaaaaaaaaaaaaaaccagtgttgagccaaatgtggaatcctcctaaattctacccactggtcctaacttcaccctccagagccaccaagaatgaggccatcccgtccccacgtggctgccccatggatatcagaaggcatccactgtgtctatctttcccaggccaagtatcccctaccctttccacagcccctgagccctcacagcctcagccagtgaaacagcttcccccaagcgctgggtcctgctctgattggcccacagctcttggaggctcccacttccaggctctagagcctcatggggactctgccactgtcccagaggcattgccctcttgggaatgaaagcctgaaggtagaaggctgaggctttggctgggaaatgccctgtctggagtgagaagatgtccttgggcctctgaagtagctctgcctccttgaaagcaagagcctgtcatgcctctatggagggctggcttgtccttacccatggccagagaaccagtcagtaacaaatgtcctctgtgtcttcagccttgaggaaggtgacacccctgtctcatgggaccctggcaggtactgggaagctggaaggaaggagtagctgttggaatgaagtagctgatagagagggtagcttgcagggggagactctagcatgggttcaaagatggaatggggcataactcagcaaaattatgctctaaggagtatctgaccaggcagtagctggttaaacagggattagctcccatttccacagtcggctgtgctgactcagtttcttgaccagggtgttgtggggtctgaagatcacccctcctcccaccacccactctccagccctatgattctgtgtagaaaccacagatttaagaacgctgcacctgcctgaaaactgttgcactgatcccaaagcgttcatattttcaaacactctggatcccactgtttccaggaatggaacaccagagtagcagaggccttttcagtgaggcagctcaggctctggctgaaggtgggcgcaggacactacctgaagcttcaccccaagagatgagggccagctccactcttcccagtcaccgcctgtgggggagggaggctggacagggcatgaaggcagagcctggtggtctgcccctcccatctaggggtggcgcacagaaagggagactccaggccacagctcacttacaccccagaataaccttgccttgagggtgggatggcttgtctgccccaggcctgttggacatttagcaaaagagaagaaaggggaatacaaacaatcctgagcttcccagaaagctttcacacctccaggatgggagagaatgaactagaagagtgaagcttccagtgcttcctcaggtccacagggaaatctggacaggggagagggtaggaatagccgcctcccccgtgagtaatgacacctcctccagcaggctgttatggggatccgattacataatgctacaaaacagttaacacagtgtctggcatttagtgtatgctcacaaaatactagctattgattctttaccaatcctagtcctaactaaccttaaccctgaccaatccaacaccaaccatccttcagtctaataacccagactaactaacttcaacattaaccctaaaactaaccaatctcacctccaatccagaccccagcctattccagctgactggtcaaccctagcaaaccctggtaacaccaattacctgcccccatgcccactggtctgcccccttcagtgtgggctttgtgggactatacttcaggcctgagatcctgctcagagctctctatcaggctgcgccctctcccctcccctctgcccctggcaggggtgaggggtgtctctgtgcttcccgagcagcgtgcaaaagctaagcgagttcctgtccagtgcagagatccgtgaggagcagtgtgccccccatgagcccacacctcagggcccagccagcaagtaccaggcggtggtgagtgcccggcctccccttgctactcccagcatggtcctctaaggcccaaaacttgggcctgctgtgtcggacttctgccttttttcccaggaagaggggctcccttccctacacagctcccagcccagtgggtcctcacctccaaaccacccccagcccctcagggttgtgaaccgcaagcgtccagcccgggaggattgtcggggcctcaccggcccactgcagagcctggtccccagtgcagatggcgatgctgacaactgctgtgtccaggtgagtcctgctgccccatgcctggccacccagcaccaactcccagagggagctcagcacctggaaagccagaaagctgcatgcttagtcctctgcagaggtcaccctgcctgcctgtacggtccataggagtccagaaaccagggaccaccaagtggggggacccccagccttaggcaagggtcagcatgagaaggccagtctcccactcccctgctctggaagtgatccaggggctggaatcagtgtcttttggctttcatggaggaggggaagccagagactattcactgggaactggctgcctttctgttctctcctgggcggtgggacacgcctaatgaagatcatgggaggctacttcacgtggaccccagatggaatccccacactgtccaacatcaccattcgtatcccccgaggtatggcccagtccacccctccagcatgcccctccccatgtcccactgaataacatagagataaaaagacaaagctgcatttattgagcacctactctctgctcattcttggtgtatgccctgggtatattatagaaggggaaggctacattctagaggcttccgtgtgctgggtgggagtgaagcactaaggacagggtaaaattgccagccttaatgtcaaaccatccattgcagacagtataggtaatgcacaaaaagatcagaagtgggtagccaaggaacgcaagtggaagtgatggggtttctgagaatggacaaaggccctgaggccatgaggcaggaggattttctggcagaggcagccatgagcaaagtatggaggtgggttggaggtgggacccaggatggtgtttcttgggaccacaaggagcctgggctcatactaggagcatgggaaaggagaagcgagtgcttaggaagggtggcggggcaggaaatcagagagggggaaggacctggggagccagaggaggatgttgatttccagaaggaaaggattaaagagggagaggacttgctggggattctaggtaggaagaaagaaaacaggggccccagggttgggtgcatctgtctgtctgtctttctgggtaatggttgttcagactcccccggccccactcacatctgccaccctccctccctgcaggccagctgactatgatcgtggggcaggtgggctgcggcaagtcctcgctccttctagccgcactgggggagatgcagaaggtctcaggggctgtcttctggagcaggtaatacatgtatcctcagggcccagtggaggggaaatctccttttaaccatcctcctcagttgaggatgcacacacatttattggagggcccactctgtgttcagtgaggactcaataaatgctgctaatggatattctcatcatcatcactagtacgtattcacctcttactatgcgcaggttctttgctaagtcctttgcatgcattatttcatttaatttttatgataactaacaaggtccatactgttctcaattctcatttatagaggaaggttaaactatttgtcctaattcacacagctaataagtggcagagctggaattgaaactcagttctgtcagactctgaatcccatggttactcagatgcacggcagtaatttcccagtgtgggaaattgcaacaccaacattggtttccagcttggtcctgagctgcactgacctacacaccataagtgggtgttctgaagatccagatgtaaccaataaatgttggtttctgggcaaagatcactgtcttaattaaagagccagaaccccaggctcagtcaatcacgaatctgttatttatacccacctacttccaagaagcacttgaaactagttgatgaaagattcatgtaaaaatcaaaaccacaatgagataccatctcacacccgttagaatggtgatcgttaaaaagtcaggaaacaacaaatgctggagaggatgtggagaaataggaacgcttttacactgttggtgggagtgtaaattagttcaaccattgtggaagacagtgcggtgattcctcaaggatctagaaccagaaataccatttgacccagcaattccattactgggtatatacccaaaggattataaatcattctactataaagacacatgcagacgtatgtttattgcagcactattcacaatagcaaagacttggaaacaacccaaatgcccatcaatgatagactggataaagaaaatgtggcacatatacaccatggaatactatgcagacataaaaaaggttgagttcgtgtcctttgcagggacatggatgaagctggaaactatcattctcagcaaactcacacaggaacagaaaagcaaataccacatgttctcactcataagtgggagttgaacaatgagaacacatggacacagggaggggaacatcacacactggggcctgtctgggggtggggggcaaggggagggatagcattaggagaaatacttaatgtagatgaagggttgatgggtgcagcaaaccaccatggcatgtgtatacctatgtaacaaacctgcacgttctgcacgtatatcccagaacttgaagtataataaaaaaagatgcatgtaaaataaaaccctttaaaaaggtaagaaaataggaactgagaaatgaagagggtaaaaagatgttcagcaacctgggcagaggacaactacagccatcaacataaaacctggctctgtgccctctggtagccaagggaaaaagggatctctgggctttggagtattcatttaggaataaaagttgcagccaatcagcagaagggcaagctttccctaccaatcatttctaggggaaaattattgaaggtgtcaggtttttcataagcatgagtacagaactgagcagggagaaagactttgggcccaatgtctgaatatcaacatgcacccccgtttcctgcatttccaagatgtccctgaatggtgtatccaaaagatggcaaatttccctcctcagtggggtcgtgggctagcagatgagccccttgggtttcccatcacctcccatcagggactgtgatgtctttgggggcagaggggtctttgcctccattcgccattttatttgggagatttttcaacatagcctgactgggaaggcccaggtattcggtttgagatcatattgccttattccgactgcctctccagcctttggagggaggagcccttttctgctgtccaactgcatgcctgcagcaagaagacaagagtccccagtgcactgtgagctgaagaaagtaaccaatatttattgggtacctcctatgggccatgccctttgctaagtgcattgtcaacatgatctcatcaagcctcctactaagtttaggaggggagtgttgttaccccatttcacagaagcagaaactcaggctcagagaagttgggtgacttactagtcagtgtgtggagcagagactctgcccatgttctttccctcaaacctggtcactgctggggcccccagggcctagtcctaagggttattgtccaagccccatgtagtggtcaggctggatctgggctctcctccaaggcagggcttttccagaaggattgcagggctcagacactggagctgcccctgccttgacctgctcagcatggatgtcaaaacccactctgaacctggtccctttgccctgctttcttctcctcccccaccctcatgccctcatgtggcatcgtgcctgcctcaggagctctccttgtcctatgtagatgaagcaggcatgattggcaggggtctgctctgccctgcctcagtccccacctcttctccaagctgtgccaaccctccgggtctgactgctgcccctctctcttaggaaacctctgccccagcccagggaacacaaggagcctctccaaggcagaggaccctaagcacttcttttttttattattttttattttattttaggttctgagatacatgtgcagagtgtgcaggtttgttacatagctatacatgtgccatggtgctttgctgcacctatcaacctgtcatctttttaagccccacatgtattaggtatttgtcctaatgctctccctcctcttgcctcccaccccccgacaggctcggtatgtgatgttcccctccctgtgtccacgtgttctcattgttcaactcccacttatagtgagcacatgtggtggttggttttctgttcctgcctaagcacttattataggccaggcactgtgcaggcacctcatcatctcagtcagtctgcaccgaactctgtgcagtagatattattatatcctcatttatcagattaggaaactgaggtgaagcaagttgtccaaggccacccagctgttaaatggcagaagtgggatttgcacctaggtgctcaagtgcattggtttgccaccatgtgctcaaagagaaggggcacaagagcctcatgaagaaggcatagctagcctgacagtccaaaggccagcagccgctgtggccatgactcacacacacctgcctcctcccagaactgccacgtgggtcctcacagctctgtccttatcaacacttactctcctttacaggtagcctaggccccagctcccagctctgttcgaggctcgcagaggggcggtagtgaaggggtctcatttctccaggatcctctttgctctctcgcccggtcctggtccagcttccctttcaagcatagtgaagtgcatttgttagcttgcagccaaccctgggaaatcatgagaatttgttcccaagtcaactcattctccagcgtccacagtgacgtattcactcacccagttgagcgcctagtgtatactagaccctgtgacagcaacaggagtgcaaaggtgactaagacgtggcccctgctttttttttttttttttttttttgagacggagtctcgccctgttgcccaggctggagtgcagtggtgcgatctcagctcctcacaagctctgcctcctaggttcaagcgattctcctgcttcagcctcccaagtagctgggactacaggtgtacaccaccatgccggctaattttttgtatttttagtagagacggggtttcactatgttggccagggtaatctcgaactcctgacctcatgatccgcccgcctcagcctcccaaagtgctgggattacaggcatgagccaccacccctggccggccccgcttttaagagaggggagagaagacctgggccttagaagagctcagaggaaccacaattgactctgcagtcaaggagaggaggctcactgcggatgtggtatttgagccttgaaggatgagtgtggtttcatcaagtagaaaaggcagggatgggaaagggaggtggtccaggcaggggtgatggtgtgggcaaagccttgctgatattaaagaacatagttctgtgcacctggaacactggatgcatggggtgcattatgaaagatgggactgaagaagtgaacttggcttagatcccatgtagtaggtctgagaagtaagatttaacccaaaggttgcaaaagaaccatgcttgtgataaaggatgatggattggggaaacagagaaaaagacagacagactgtaggaagggaggtattagcaaataatcataacacagtgtgaggtgtgcattaatattcactcattccaagtattgatcaagaagagaggtaggtactgggttaggaaacagcttgggcaaatgcatggggaaatgagagatgtcaagatgcattctaatggcagcctcttgaagatcttaagttgtttttggttcactcatttcgcaaatgaattcatttagcaaaagcactatggatacagtgcttacctctaggaagtaagttttagcccaaatgctgcagaaggatcatgcttatgacaaaggatgatggactggggagagagaaaaagaaaagacagacagactccaggaaggaaggtcagtctgcagctccttatagtggctaggagaaggagtctaggcagatacgactcaattagcttcatctgctgtttgtctctcaaaatctagacatgtgcactgctctggctggcccacctatcctgggcattgagttaagtgtgggggctgtgtgttgagagtccccctccattactggcaggaactccacacctcagacattgagccccaggtctgcagggagaagacgtgcttgcaaagtgagctaaaagcaaaacagcctctgacctggcaagcattcccaagtctgcacgcctgcagccagaggagagggtgatgccaggctgctgctcagatgcttttcagccatacccaggccaagacctggtgaccaggcagccagaaggagttccaggaggcacaaggcaggaagttgggggattaggaggtgtagaatggagaatgctctggggagatgggtgctttgttggtgcaactattcgtttattcctccagtgaccacgtgagcagtatggctgcacacacaggctctgcagccaagctgcctgggttcacatttggtctctgtgctttggaaaatttcataagctttctctaccagtttcccttattacccatgagattgatgtgaggattaacctagcatgtagtaaatatcctataaatattattattcaatagtgtacttctttgccaggaacaaaattcacctgttcctctttaaatgtcctccagtctgtctcctgggaaagattcttgtgagctccctggggacagggaccatattttgtttgtctcactgtatccgtagtgctttttgctaaacgaattcacttgctaaatgaatgaaccaggaacaacttaagaccttcaagaggctgccattataatgcatcttgacatctctctcctttccacatgcctttgtccgagctgtttcctaacccagtatttcactacccctcttctccatcaatatttggaatgagcaaataccgttagtgcatacctcacatggtattataattatttgctaatgcgtctgtctcctccatgactctgagctccttgagggattattccatgttgtaccccaggtgccccatgcagatgtgtattttgtgcactgttctgtgtaggctacaaaggaaaaggcctagcacctgcccttggggagctcacccacccaggatggacagaggtgtgcagacagagctgcagggtgggcacaaagggtccatctgctgaagtcctgcagatgcagccccgagcttgtccctcacgtcagcagcctggctcctggtctcagagagaactgtgtggttcccaagcattcactttaggaagaatcacttgcccctccctggctctctgcttcaaggaactgtgacaaccttgggatttgcaaactctctctttaatccttaagaggaaaatgttttggtaaaaagtcaagattagcagatacactcgggtgaaattctttccctggaaataaagaatagagccattaatatccacagtagagtgactttaaatgcccccggggggtcagcaggaaccagggccctgaggaaaggatcagcgtggggaagaggctcccacttccctgtgaggagctgcacatgcagtctcactggagctccctgctgcaatgctgttgcctgtggtggttggtgtggatgctgcctgccaagagccctgattccccaggaagagagaaaaaggcttctctcaggacggccctggtcgcatctgcctgtacaattcctggagcctttggggagctgaagtcaggggctcaagtgcccctgggtttcctggaggaggcaggtgtggtgagacagctgacagacaggagaagggatgctctgaggaagtgactgtccagccatgggaaccagatggcccctggctgtagtcctgatgctgccacttgctagctctgtgaccttgagcaggttacttcacctctctgagacagactcactgtctggacaatgagtaaaaccctacctttcctgtctcagagatttggcaatgggacccaatgacatcaattggaaaggatgctgtgggtgaaaggtaacctttcaggacagcgacaagcctgtctgggcaggatgaatgggctgtggagccctgtatatcctagctcactctttgaacctcagtttccacttcttccctttttatttattgccggggtcttaaatgagtgttgggggtatctgattctccctctgcctgtacttttggggccaagcactgagctgaaaagacaattcctcctagttctccaagcctacaacctgccccctaaccagctgtgagctgtaatacattctccagtgtcactgtgaggtttgtgccttcacccccattttatagatcaggaaacagaggctcctccaagtaaaggagcttgcctcagatttcacagccaatgagtggaaaagcctctgggattcaaatgtcagagcccatatttttcctacttctcgcacctgttatcatatgctgcctcttcctttaacctgcagttccctcccttcacctccaccgtctcaatccttcccactctttaaggttcagttcagctatgacttcttctatgaggctctactcattttctcagatttcttcctcctccaaatttcttgtaaaaattatgttttttctctgattctaaaagaatgcacattacattagaaaagatacacaagcatacagaagataaaaaccacctaatatcccatcacccagaagcttccagtttttctttatgcatttgcatatgcatttgtgtttacttttccccaaaagttctccgatactttgtcctacttttcttttgacccttataacttcctgacttcggtacctttctgatttgccctaccagagtgtgagcccctggaaggcagcctctgcaccctgattcaggttgccacacatatgccagctcctagtgggctggagggaaggacatgcggttggggaactggaagactcatgctttcagctgtgtgcttcctccctagagtgcaggcagaggaggaatcgaatcccctcagcactcttgtaaagaccacagcaatgagtgagagatggtgcctgccagacataccattctttacttttcagcttaaaacagatacaaagtttggggaggctcactggaggaggcttggggctacactggaaagagaagaacttggattcacaccccagcttcccctcttcccagctctgtcacatttgcaaactctgagtctcagtatcctcatgtgtaaaatggggatagggtttatagggttgtaaggatgagatgatgagttgtttgcaaacaacttctcacagtgcacagtgaaggtcagcaatgagagccagccccgccctttcttctttccaaatgattaatatatctgttaccagcctccattcattatatagctctgtcatgtgctaagcaccatgggggctgaaaaagatgttcttcctgccttaaaattccactggggatgaacaaattacacgggagctgatcagagaggaaggcagtccattatgagggctaattgagcagtgcagaccatgttgcaaactgagttagggcctggagagcttactgtgtgctggggtcctcaggaatgccacagatgcatcaataaccacctctgctactctggaagtagtcacatcaggaagactccagagataagcttatctgggctgtggccacagagctggaatttgtaagctttaggtttctatgtctcatgttaccagcttgtctataaattgtaaattacagccatctgatggttagggaatatgaagtttggttaagagaatgaaatgagaccacgaagattagagaacaggaaaagaggggactggggactacatacccatcagaatcttcattcagtcctgaccctcagcaggagggggatttcatcaggctcatttccatccttgatttcgtccatcctggttctcctgacaaggggcatttatcagagttatggcatgggaaatcacaggggagtaatgtaccatggcatttaagagtatgaacgttggagtcggagctattttctccgctacttactagctgtgtgactttgggcaagttacttagcctttctctgagcctcactttctttatctgtaaagtgagggcgatcagaataaacctccttcatatggttattttgagctttataaagagacaatactggctgagcacggtggctcactgccagtaatcccagcactttaggaggccaaagctggaggatcgcttgagcccaggagttggagaccagcctgggcaacatagggaatgagactcctgtctctacaaaaaatatacaaaaattagtcaggcatggtggtacgtgcctgtaatcccatctactcaggaggctaaggcaggaggatcgcttgagcccaggaggtggaggttgcagtgagccaagatcacgccattgtactccagcctgggcaacaggagtgaaaccctgtctgagagagagagagagagagaaaatactactatggtgcttataaaagttcaataaattttagctgttgttagtattattaaagtaagatctgtatgaaaataaagcagattttttcccccaaatgttcatgtcagaagtatatatttcattggcaaggggctgcttctggaaggttgagaggtatcctgggggaggggatagagcactggcaaaattggcatcacaattcaagtcacctcactcagtgttttttaagttatcaaaatccacagtatgaaaagcatttgacattacagtccactatatttatgcatttataaacaagagaaaaaatcacgaaaaatacagtaccacgtgcagtacacactgattccatctattctttttttttctttttcctcaaatgcacttgccgcctacttattccagacccaatgattgggtccctatccacagtttggaaaacactataagaaatgattgtgtcctctcactttccctctctgggatttagttttccaactataaaatgctcctgatgcccagccagcctcaccgctgctccgagtcaatgccaggaacgctgatttagcacatgctatttggagggtacccatccaggtgctgtgggagggacagagattgagaagagtgctttctgaccccacagaggccatttggaaaccctgggaatgggtgggagggttggaggtggggattgcttctcccctaagactcagcgtgatggaaaggcaatggggtgggaactaactggtgttggtctgtcccatttgtgtcccagcagccttcctgacagcgagataggagaggaccccaggtacagccttgggactgggtcagaagtgggtctcaacaaagggaaggggtagggtgggggtggaggacttgtgggtgggtaatgctgagtatggattcagggatgtgcagcctacatattttcagagacatggggctaaggcctgcattctcaatgagggcaaaatttggttcttggggacagaaaacacttagacattgcaatgctttgtggctgtccaaagtaccaaacagatgccagtatatctgtggtgctgaaatttcatggtgaatggagtcagaaaatagactagcgattgccagggtctggtgggagagagagggaagggactgccaatgtgtatgggatttgttttggggaagataaaaatgttttggaattagatagtggagatagttgcacaacctggtgaacgtacttttagtttcagaggttttctaaacctctgatttttttttaagtgacaggaaagacagaaaaaagtatatctaaaaaggctctaggggtgatcatggaaaagaaagttaagaaatatgactgtaaggaaaggagatgggtgtccctcaggccaggcagaaaattcagtcttgttgctttatgttcatgtgcaaatctaaaaaatccaagtgatatagattaatgaggctctgagtccctcaaaaccttccctccccttacctctccaaaaaacacttgagataccctagaggtggtatgaagtcaggatgggaaggttggctcagctttgcaaataagtttaagcctctggcctttgctctccaacaccaaagaggcttcactttggtatattttctctgccctttctccctccttgtccccaactgtcagtatgtgatgacaggctcagcctctgtaatggtagtgatcatatttcttgagccaaaaatcagacctcatggcatgtgacaagtttgcatatgtggatgagaacagagtggcagaatatttgacacgggagcagcttgggcagtccagggcacatggcactgcacctgacatccctggcagatcccccacattccgtggttgtcttctgatggggccatatggggctgcagatcatgcctggagccctcgcagctccagggctgcgggttcccagccccagagtgcaggtgctggtgtcagcctgcctggcctggcctggctctgtccagagcactccttgccccagctgtttgtgcagctgtatcagcctcagacctcagcctattcattccaacctgaatgcagaggctgggtctggaggagccacattgcgggcttcatactcctgatctgacaagttttccccccagagcctgcaccaatggcacctctccccattctccctcttaactgggtcctccagggccctcctcacacacccacgtggtcaggcagcagaggcttccccaagatgggcacaccccactctccacacctctctatgcagcatttgtggctacagactgggtccaggggattgtaaaggcatgctcatgttgggttggagggagctcaggatcttcctggaggatatggttcactcccatgagagctcagtatgcctttcctcccctgctgcagcccagagcgggagacagcgaccgacttggatatcaggtactgcgtcctgggaacattgccccccagggtcaactccctccagggtgctctcaggcccaagggagccacatcaccctgctgggcagcccccagaccccagccccagtgttgggggaggccagggagggcccctgtgctccaccaggtggctcgggagctgctgctgtttctgtgcatccatttactcccttcacataagatcatttttatctgggatctctttttcttttttcttcaaaaaccacatcactcaaaatgtggcttccttggctctgcttttaaaaaaaaaaaaaaaagttcttccatttggagaattacctgctgacttcaaagtccagtggcttgagggctacccaaagagggaggaagccagaagttgagtgttcccttggtttggtcacacttttgggctcctccctgactaaggaacaacagactgcagggctggggcaggctgggtgtagggcagggaggggatgaggtcctgctgccccagtcagttgagacccagacctctcaaacctgcctgggggaaggcaaggccaccagaggccacactaagcagatttctaccaactgcacctccccatccccttgcctccatctgagccatcagcttgacaactgcctctgagaacaagcccctgagaatgccttccgcaccccctactcccgccctgctttttccaggaagagaggccccgtggcctatgcttcgcagaaaccatggctgctaaatgccactgtggaggagaacatcatctttgagagtcccttcaacaaacaacggtaaaagcctgtcggagggaggcaggatgtggaggggaggaactgtctctggccagcctgccccagttccgggcccctccatcgatcacccacacccagccatctcactccccaggtgcttacctgcactccagcctctccatatggtgcacctggagaggggccaggtgtgcctgagcattggggcaatccagctcccataggggagagggcaggaatggagggaagggagagagccccgctgccttttctctagctggtgggagggctagctagctctctctgtgagtctccattcgcctggctcctgcactattttccctccaatgataatagttagggctagcatcgactgcgctcttactacataccaggcacagtgccgagctctttgtacacggaatttcctctcatgcttacaacaacctcagtaggtagatattattgttattcccactctacagatgaagaaccaagtttcagaaaggtcccaaggccacccagccagtaagtgaccaagatgggtctcaaatccaaagctgcctaacacctaagtacatgtttgtcaccaacatactctgatgcctccatgaactctggctggcacctgcccaggctaagggctggctggggaagtatgagaggaacaggctgggcaaatatttgaccagccatcatcattactgcctaaaccaaccagcagtggttttccctgcagtgccccaagcacgggttccggctgcagcttttcccactgcacagagatcatgagcgccctttcatcacttactctgcatatttgttcccaaccaattccatccttctagtatttaacctgcccaaacgctgtgtgaagtgctgacctcagctcttttcaagctcacacggtgtttgcttgcacccaagcgggaggcctattaaagccattgctcaccctgggcatagctacccagagactaatgaccctctgcaagtgctcgggccaactctgaccaggctgaccagctgcatcccctgcctctacccacgccaggtacaagatggtcattgaagcctgctctctgcagccagacatcgacatcctgccccatggagaccagacccagattggggaacgggttagtagcagcctctgaggggttttttcaaagccaggacccccaacctaccatgccctgagacactactcaggacaatgggtaactaggaaataggagacattgaaggctgaagagttgcctgcagtaaggtcaaacatgttgttcttgatgatgtcctttgacaggttttcagtcctgcttggagggcaaggtcagcttagtgccctcccaggctggggatcttcttcatttgcaccccaggtatacactgagagcccacacagcactgtgctcagcctggggttgtattgttcctgttcatcctccagatggggtcccctccacaagcttagacgaacaggattctcctgtgactgtcctccttttgtgtgattttaatccctgctgcctctgtctttgtttgtactggtcagatggtccctagcgcctacacaatgaatctttaaagacttggggctcatgctgccctcttctgaatgaattcagtaaacacgtgcaagttccttctctatgcaaggtgagaagcaggcaaagaagtggatagagccaggcctccatcccaaagagctcatagtccagtagggtacaggacagtgtctcctgaatggctgagggcatgatgtgttcctcctctttggtgacagggcatcaacctgtctggtggtcaacgccagcgaatcagtgtggcccgagccctctaccagcacgccaacgttgtcttcttggtgagtgcaagttcccttggggtcctggtctctggctgcctcccaggcctaactgcccacctccacctccccgcaaccccaccatcatccaacaatctccctctccaggagtaaatccctcctgccagagatattgccttatcatcctagtgatagggaaactgaggcaggcaaggatagcacaaatgacccattgcagacttcagatggagctctgcagtagccaatgaggagaggcaagctgtagttataggctgcctgtctgtgggacagcccaacccctcaacacttatgcagcccgactataagaatggctgataacagaatgtgtgctgccacttcccatcttatgcccagtgcagacattgctaattgttcacagcattatttcccatggaacttaactcatcctcagaatccttctcaacacagcactccaggtaaccactagccatcaaacatgagataaaactaggccaggcgcggtggctcacgcctgttattccagcactttgggaggccgaggcaggcggatcacgaggtcgggagatcgagaccatcctggccaacacggtgaaaccccgtctctactaaaaatacaaaaaattagctgggtgcggtggcgggcgcctgtagtcccagctactccggaggctgaggcaggagaatggcgtgaacccgggaggcggagcttgcagcgagccgagatcgcaccactgcactccagcctggggacaaaccgagactttgtctcaaaaaaaaaaaaaaaaaaaagaacgtattcgcaatccttacactacttcatgtcaagttctgttgtgtcaggtgccttgactgacactgaagaattctaagaaccagtccttggcctcaaagatttagaatctgattagggagacagagctcacccagttcaagaggcccagcccggttcaaatccaaactgtgcggcataaactatgagggggccttgtccagggagacaactgtgagggctggagtaatcagggagggcttcctggaggagagcctcaaagggagagtcaattaaacagaaggaaagagggaggccatttgcacagtgagttggaagaaggaagctcaagtctctgattccagctttattccctcccctctccctacaccacacgcacaagcactcctttactaaagacacttcacagtgggaagattcagtctccgttaccgtctgacacacacacagcgttttacaaagcatgggtgcattcgcgatctctcatgagatttaaacaaccctgctagagaaaagtgaagtggacattttatttcagtaaacgtttatgaagcgtctactctgtgccaggcactaaacgtttatgaagcgtctactctgtgccaggcacaggcacaagaagtctcagttcttgggagtgccataatcaggaatggacaaacaatgatcagatctggctttgcgccagtgtcacgggaatagggaggaaggaagggtaggcgtgggggtcaggacaggatgcaggaggaactggtgcttaggtgagcgaaggatgggtgggagttcacaaggcagacaaaaggcagagcagcactccaggcagaggaacagctcaggagaaggcccagacggcaggcttcctgggaacctggaatgcagagtgctgggaaagcacagatgaagcatgagtctagaagggaaagcgagaggttataaagcacctggaacaccagcccacagggtttgactttagagatgatggggagccgttgaaggtccaggagtcaggcagtgaagtgattagatctgtttgagagtgatatctgacaactgccccattttaaatgaggtaaccaaggcccagagaggttgggtgagttgtccaaagccacacagctaactagcttcagtccctagagcagagttgatagaactctaatgggttttatactcattgtcacccctccccaccatgcctttccctaccctctactctcttcctctcccttctgcccaggatgaccccttctcagctctggatatccatctgagtgaccacttaatgcaggccggcatccttgagctgctccgggacgacaagaggacagtggtcttagtgacccacaagctacagtacctgccccatgcagactgggtgagggggaacaagggggtcaggctatagggggcagggctggggaggctgtcaggcatcttggcaggaaccaatccgttgtcttggtagcaactgctgagggccacaaagcataagagaccagcactggatggctttatgcatgctgggcatttcagggagaccctgtacaggccaggggtttggtatcacctagacccacagacactccccatcctggcccgggccccccatggtacactcaaggctggcaccaagaagtctcaggaataatcaagtgctcacttctcaccttctgattcctgcccttttgatgacccatccccgcagtcatggggagtgcccatttggatggaaaagccctcttcccaccctatgaccttcccggggtggatggatgcaccaccccgggaatcatatgggaaatatggaaccaaacaatagcagtagtaatagaaacttcaggctgggcgcaggggctcacacctgtaatcccagcactttgggaggccaggacaagaggatcacttgagcccagaagtttaaggctgctgtgaaccatgatcatgccactgcactccactacagcctgggcgacagagccttgtctctgaaaatttgaaaaaggaaagaaagaaagaaagaaacttcaatattatcagtagagtccaatgttgtgaaacccctcattaactaaatttccatactcttcagtaggtagaaaataattactttttgattcattagaaagcacttaatttttaagatggagatcatgtaattttgaactctaggtcttgcctactcctatataaattctcctctaaacaacagccaaaattgaggccctctttgagcttcaggctggtgccaaatggctctgcttattttccccaaaataaatcttccttccatgtatgatgagaccccctccagtataaagaagacccaaagaaaatcacccaaagaaaaaaggcccaaagataagacccaaagacctaaagatttaaatatatatacagatacagaaggtttgtttctgagtttctgtagtgaccttggcaataccttgtagttcaggacaatcctgaggaacacagaagtgctggcttccttgaggaatcagtgatcaggactctcgagccccttgaaccccagcatagggcgggagggggtgagggcagcaggggtgggtgtctgaattaatgtcaggtctacgtgatggtgtcatcaagtgttccagataaaaagttttattgagccgggcgcggtggctaatgcctgtaatcccagcaccttgggaggccaaggcgggtggattgcttgagcccaggagttcgagaccagcttggggcaacatggtgaaaccctatctctataaaaaaaaaaaaaaaaattagccaggtatggtggcgtgcacctgtggtcccagctactcaggaggctgaggcaggaggatggcttgagccaggaagcagagattgcagtgagctgagatggtgccattgcaccccagcctaggcaacagagtgagaccctgtctcaaaaaaaaaaaaaaaaaaagatttattgattccaaagaggcatggccacacacacttagaccagcaggtgctttgctaagccctgatggaggctgccagacccgccgtcaagaggagctaagggtagtgtacaatgagcccacttagtgtatgacggccgctgccgtgggtggagtccttgtgagtaaccagccagcttgagcaggatgcactaatttgctctgcaaacccagccattgagaaatacgcctcagatgtaccgaactctaggtcctaggagtatgttggttggggtaggttatcaataccagcccacttgcagtggatgagctggtggccatttgtagtgaggaaagggatgtgtcaacctccatcttagactccacaattgagggatgtgaccaccattcctccccagccagcccccaaaccacgtttgttgctgcctttccagatcattgccatgaaggatggcaccatccagagggagggtaccctcaaggacttccagaggtctgaatgccagctctttgagcactggaagaccctcatgaaccgacaggaccaagagctggagaaggtgggtatatccagggatggccaagcagccacccctggatgcaaaggttctgctagaacctgaactcataaaggtcttcctgtccttagtgccccaggaagccccctaaagggcagatgtgggagctgggcatgaactggctcctaccagaggagagacagtacctgtgccaggtgcccagggcagaatcaggtgggcaccttcgccttatcctgaggtagtcagatactatttagttgcaaagtttcagaaaatcaactcaaactggcaaagaaaactaagcaaagaaaacaagagggaattaaggatttattgacccatgaaaccaaaaagtccaggtgtgtcatagctttaagtgtgctggatccaggtagtcagtgtaatcagaaatctgtttctcccatctcttgactctgctcccctcaaattggctcagctcccctcaaattggctccattctcatggtatcagtgagggccaccagcagtcttaggtttacattctcccagctcaacaactctgccagaaaaaaagtgcctctttccccatagttcagcaaaagtcccagggctgagtctcactggtccagtttggtcatgtgcccacccctgaacaaatcactgtggccagcggtgtggaatgtgaggattggcctgtcctgggtcacgtgccactttgggagccagatccacctgaatcacagagactaaaaacaggggaagagtggttccccacagggatatgggggtgctattatctgatgaaggggaaggactaaatcctggcaagatgaatgtgtgtctgtctgcccctccctcaggcagggacaaagtagaaatctgacattggtcatcaccagagtagttaccccttaacttccccttcccccaccaaccatatatcctgaagacattgcccaggccacatctgtcttttaggagactgtcacagagagaaaagccacagagccaccccagggcctatctcgtgccatgtcctcgagggatggccttctgcaggatgaggaagaggaggaaggtacaggcaatgggactgggagtgaaattatggcctgaggtctgatcagccacagagaggctaaggtttggggttctgggtgtggtgcagtagtgtgcctttgattaaatggcttccctctgtgtgcccccgttgtcccctcagtaagtggggataaaatgccctgattcaccctcagagggatggaaatgtgtagccacagagtgggttcttgcggcctgcagaggaggcagctgagagcgaggaggatgacaacctgtcgtccatgctgcaccagcgtgctgagatcccatggcgagcctgcgccaagtacctgtcctccgccggcatcctgctcctgtcgttgctggtcttctcacagctgctcaagcacatggtcctggtggccatcgactactggctggccaagtggaccgacagcgccctgaccctgacccctgcagccaggaactgctccctcagccaggtgtgactggcggcccatggcagaggttgggagtggggatgggggaagggctgagcccatgggcaccctggaactccaaatcactctctgcctgtgaaggagtgcaccctcgaccagactgtctatgccatggtgttcacggtgctctgcagcctgggcattgtgctgtgcctcgtcacgtctgtcactgtggagtggacagggctgaaggtggccaagagactgcaccgcagcctgctaaaccggatcatcctagcccccatgaggtacccgtctcccctggccaggctgggactgtgagcaagtcactgttctctgagccttagtcttcccatctataaaatggggatatacaacctgtcacaagcttgtgggggtgactcaaggagacagtgtgtgtaaaagtgccctccttgtgcaagaagcagggagaaactggcatttactcagccagatactgtgataggcattgtgtgtggttagctcatttaattgttaccatggccctttaaagtgagcgtctgcacatccaagtaaagattgttttctcctccctaagtgggtgtaatttgcccatccccacccatgagttcagctccctgccctcccctcactctctctccctcagccagcctcaggttttgacactgggggaacaggtagctgttctattaataatttcctgtaatgggatggataaaaatctcaaaggccacttgatgtcaaagaggtttaaagttgtccctgcccaattggttggccaacttggcttaaaaacacaacaggcaaacagattttctggccccttgtcgaggctagacctcacaatctaactgcactttttactttccagcctcatgagttttctgtggcccacagatatggcctccaagtttatttacttttactctctatttgccccagctctgtagttctgaaactccctggttggggttgggctgactctgggtcagccagccggcaggctgtccccagggccctgttcctcttggcaggttgtccctctggagaggactctgtgtcccaggaggacagctgctgagtcaggccgagccggcagctgagaaaggcggcagtcgtcagatgggcttgagaaactgaaaggctaacgaaaggccagcgcccctttgggcagctgcaggaattcacggggatacaggccagatgtctacaaattggcagaggatgccagacccatgaatgactccagagacacttacatgaaataattaactatctcattcagtaaacaggaagtaaatcaatggacaaatgagtaactcttcctctggctgcctcttaggttttttgagaccacgccccttgggagcatcctgaacagattttcatctgactgtaacaccatcgaccaggtacagaggaccgtgccacactatccccccttccagagacacctcggacccctgggggcttctcctgtctgaggctgggttccccagatcaggtgatcacagccctctgggaagaagccagtgtccccgatccgattataatgctgcttcagggctggggcctccctcgtgggagcctcacagtaaggctgagggaaaccagatccctttagcttccacctgagatcccactggctttctctagtaaagttccagcatattctgaaccaaggtggctgattgtatggagaatattcattttgattcagcctgtgttctttatttaccattgtaccagatggtgtgaaaacaaaatcttgattcctacctcagggagtttaccttgtagctggagagatgagatacgtgcctataataaagggagagcaaggccgggctcagtggctcactcctgtaaccccagcactttgggaggcggaggcaggcggatcacttgaggccaggtgttcaagaccagcctgatggccaacatgatgaaaccccttctctattaaaaatacaaaaattagccaggtgtggtggcaggtgcctgtaatcccaactacttgggaagctgaggcaggagaatcatttgaacccaaggggcagaggctgccgtgaaccgagattacgctgctgcactcaagtctgggcaacagtgagactcagtctcaaaaaaataaaggatcaaaaaataaagtgagagcaaaacatggcggccagtagcactctaaacacagtcaataccaaaattcacctcactctctccccctcgtctccctcagcacatcccatccacgctggagtgcctgagccgctccaccctgctctgtgtctcagccctggccgtcatctcctatgtcacacctgtgttcctcgtggccctcttgcccctggccatcgtgtgctacttcatccagaagtacttccgggtggcgtccaggtgatggcctcaggggtgaggggtgggaggtgctttgcaatgtgcagtttggtgtacttgctagactcatcgttatgagagtaatagggtcgtgttccctccaaaaaataaaaacaaaaaacagaaatgaaggaaatagaaatatccacatcttattccaccgccctaatataatagtctgccaacacacgcacacactgaggttgacatctgaattatttccttgggcgatatggtcaggactggaattgctaggtcatgataaatgcacattttatgcccttcattcattttgccaacatgcttcccaggagggttgcatcattctagtggtcaggctgattgctgatgcatgaaatcggcgggcacctgattcaagcagtgttatgataacacctcccagcccacgtgagtccagagtgtagctgtaagccttgacttgagggagcctctcacagccattctcatggatcacatttgccctcatgagctttggatccatgcacgcctctttcctcctcaaaattttctaagaatgttctctagggagttctttctgggagtgattctcccagattcatagaaactcatagattcaaaaaattgtaggaaaaaatttaaagaacgtctaggccagtgtttctcaaactgccaattacagcccatcagtgggtcatgaaatcaatatcatggatcacaaccagcatttttttaaaaatgaaaaaaacatcagactgtattcatagagtaaagcaagctttgcttcatgaaacctttgtgttggtcatggaggtgtgtgagtactgatttgtgagataaaatatatttctgactgcaggttgtggtcagaaaggttaagtacctttcccaagtgcacatagttggctagaaactagagttgagatacttattagcaataataaaatttagatgcattttggacacaattacctgccccaaaggatcaacatttgtataaatggctttttgcttggatgatccagaatggcccgacacccacacgaacaacatagctttttgacactcaaaaaattcaaagtgctgcacaagctgttctacaaagttcatttcttctgccagagaaacagcccagtctctgtggcacccagtctgaccctggagatggtttatcagggaaatcaacttcctgcatcccaaactggcctccctggcactgatgtgcttgtcgaggtgcagctttggggagcaggaggcaattctgttgccatggaaacctctggccttaccccgagacgaaacctatcatttcagcacatcactggccagggtctaaagagctccttgatggggtaagcggaagacggggttgaacgctttgagtttggtcttctgttcctttggccagctgtctcaaggttcagattgttcacctgtaaaatggaactagcactgcctgcccagccttagctcagctccaggctgtgcagcagaagtacagggacagatggcgacctggggttgacaatgcccaggacagcagtaattgtgccccacatcaggctgtgtctaagcattgtacataaacgatctcattcagtgctcacaaaagctcaatgggctggtggcattgtcttcccccttcacggggtaagaagctgaggcctagagaggtaaggccattcacccacacagcggtagcaggtggagctaggcttcaggcccaggccgagccctgagcctgccctcttaactgttccactctgttccccgccacagggacctgcagcagctggatgacaccacccagcttccacttctctcacactttgccgaaaccgtagaaggactcaccaccatccgggccttcaggtacgagtccacattcccccaaggtaggagtggaacaggggtggggccagggggcacaggccatgagatttgattctcaggactccacttgggaaggccaaggacacgttctctctcaagctgcctcaggtcccaaggcccaagggatatccaccagcagggacaggccaggtgggctcccactgaatgttctagagaggaaaattccagctctgtagacaagcccaggacctctgtgaggcagagcatgaaaagagacaaagctgggacaagtcttcatgtatcaacgctagaaagggccttaggtgcgggccaccctaagcccttcttttattaaggagcccctgtgtgccaaacactatgctgagtactgtacaggccaatcccactcattctgcactgcaaccctcggtgctgagaatggtcatttccattgcacagacaaggaaactgaggcacagagacgttctataacctctctgtgtaaggtgccacaaagcccagacttgaacctatttgttcatgcaacaaacatttactaagccccgactatgtgctaagccccatgccaggcactaaaaagatgagtcaaataagccgctgccctgcaggcgtttacagcccagactttgagcaggccaggataaatccacgtgacaagtattctgaaaaaagcggattcaagggctgtgggagcatagaagagagacagtccgggaaggtttttgtaccagaggtgtcatcagaactaggactcaaaggaggggcaggagttcaccaggctgaggaattcctgaaaacttcagtgcccctgccatcgtctcactaccctgagtggtgatgttggggtggacaggagcatctgaggttgcctggggaatgagggaagctgttgtttcccactccccaagagtctgtctgatctccagaggcatctctcttccagtcaggcaggccagagacccctgacacacaaagttgggctcttttctcatcttcatccagagagtgataataggttatttttagggtggcacagctgcacgaagtatgacagtaaccatgagacaccaagcactgtgtccaggagtaaccatagggcacaaggaccagccaagggccagagaggcttacatctcctccccccaacccctgaagtccagcttcagccctggagaggtatccaggcccctctgcccaccctggagcacctagggccagtggaaatccacctcttagggatcttgtctaagtaaagaagagcagagcaaagctctgccctggccttggcgctgctccctggacatcccttgcccctggacaagcctatgctgtgtcttccacaaagaagcttgctggggactggattatgactctagagtctcctcccagcctcctcttctcaagcctgaacttctcccgttccttcaacttccaggtccctcgacattactgagcctagcctttgctctaagttttggtgatttccctctctcaattggtgtctcagagggccctggggtagagagatggtgactcttctagagtgggccacagccccttgtgtgcagatcccagcttcctgtaaacagcctcagatcaggccaaacctgtggtcagccagagccactgctacccagtgaggtcttccacaccctactgacacggtgaatgatttttaaatttgaatgaaaggctttttaatcaaccccatacacatttaatgcattggctttaatccagcagcctgttgagagctattagcacttattgattgcccacttactgtatgccaggcaccgtgctaagtgttgtatgtgcattattacatttaatcctcacaaggaccacataacataggtacgaatcgccacattctccagatgcagaagcgagacccagagaggctgggtaatcaatccaaggtcacacagactgcgggggctggcgctgagcttggaacccaggtttgcctgaccttctgggctttcctaagagatcttattttttcccaaaagagtttcaagagtgcccagcactgggctcagtggcgggctcggaggttgttttcgttcatgtaggaactatcacttccccatttttttcataagaaaactgagtctcagtcctgatacacagccaggaagttgtgatgttcaggctccaacctgggtttacatggctccgaggctggggctcttttctagtcctcagacacactgtcgcacgcctgtggcagaagctcccatctcacacttgccgaccctcaactcacacagtcctgagacccacatacgctgagcgcctcacactcctataacacgcacatgccctgatgcacacacattttcaacacgcacttactctacccttcaggcatggtttcacactcactgcagacacgtcaccctcccacacgtctccaccctgggggtgtgcagtagcatgctctctcccacctcagaacctcccttcagtcccctcagacacatgccctctctccacgcagagacaatcaaagctgaactaacaccttccagggtgaaaagcaaatgcccagtaaggtacgtcttgggtgcctccgtgtcccctgagtttggtcctatcaaaccagcgatgatgaggcagcttttctttcgttccttcctccatcatcaaacaagtgctcctgcatctcctctgggccgggcctacgtcagcaaggtctgagggaagcggccaaggagagtgatgacggcagcccaggttgatcagagaaaggaggcaggtccatgcgcagtaactcagggaaaacatgatgaggacctaaggatgagaaagaagcctccagagttccctgtgcagagagattccatcaatttcagagggtcaggggagtgccatgcattcatccaacaaatatttattgatagtgccaggtgctggggtatattggtgaataaaacatcttcatggaatttgcagtctattgagggagatgattataaatagctagagaaatgcatgtacagcagatactgtggagcaaacaggttgcagacaataataggggaaacctactttatagtaaggtagtagccaggaagagcctctctgaggaggcagcatttaaggcaagccctgaaggttgagttgagccagccttatgaagagcaagggcaaaagccttccaggaaaagggaatagtgtgtgcaaaggccctggggtagggaagactttagtattgtcacagagcttttaaaaagctgagtggctgcagcatagtgtgtggggtgtttgtggcaggaattaggttggcaggagggggttcttcatcctataagcagtggaaggtcattaatattcttttttatttgtttttttttttttttttttttttttttttgaggcagagtctcactttgtcacccaggctggagtgcagtgaggtgatcttggctcactgcaacctccacctcccgggttcaagcaattatcctggcttcctcagcctcccaagtagctgggattacaggtgtgcaccaccatgcccagctactaatttttgtattattagtagagacagaattccaccatgttggccaggctggtcttgaactcttgacctcaggtgatccgcccgcctcagcctcccaaagtgctgggattacaggggtgagtcaccgcatccggccggagatcattaatattctaaacagtgggggagaggacacagtttgcgatttagatagattaagccagccactgtgtggagcatggactgtagggagacagcaggtagacgtattcaggaagctgatgcagtagtccaggtgagagtttgtggtgggcaggaagcaggatagagggggagggaggcaaggactcttttagagagagacataagaggacttgccaaggggctgaatgtgaatccaggtgattcctgggtgagaaactgggtaaagggaggtgccccttattataatgggaaagacctagagaaaatggatcttggggtgaaaacaagagtttggaggaggtggggattctggacaggtttgaataagcagaaaggagtggggtggacattccagagagggatagcttacatgaagtggccacggtggcatgtctggggactggaggggccctggagcctccctctgcaggtagggagactcctaggagctatgtggaccaacactgttcccttaggagcttctcatcctccctccaggtatgaggcccggttccagcagaagcttctcgaatacacagactccaacaacattgcttccctcttcctcacagctgccaacagatggctggaagtccgaatggcaagtgctattcccctctaccctggcctctgataggagggtggggccagagcaagagcacacaggtacctggggatgaaagagaggataggataccagatcgtgtggacaccaagccttcctgcttcccccagccctggtggtcctcctagtgtctagcctgtgctccttttccccatatcactgcctggaggcttgtgtatctgaggtgtgtgccagtggcaagaacagttgtggtgaatgtgtatctgcagtgggtcatatgacacccacattgtgtgtgtttgtgggccagctgaggcgtgcatgttaaagggtgtgcaggggctagggggtaggggagcatgagcttgtgggacatgttggctcctggggctccagccttcgcagcccttgtgtgtgtctggtgacgtgtgcatgagttgcagggctggagtggaggcctggctgagctgctctctgccccgaaaaggagtgaggtagaacaggggcctgtggctctaacccctgagcgcccaggtcagctcctctccctccccaggagtacatcggtgcatgtgtggtgctcatcgcagcggtgacctccatctccaactccctgcacagggagctctctgctggcctggtgggcctgggccttacctacgccctaatggtgagcggcagtgggctagggcagaggaggggtcagacaccagcactcccggagcaccttcgtcactggagacatgagacactcccaggccttaccccaatttcatttgcatctgatgccagagggacagtgcgggcaggaaggctgaccagcaggccccagggcccaggccccagacaggtggaggttggggagccacatgactgaccctccctgtgcctccagggagggctgctctgagcaggcagtggatggcagcaaaaggaatctggggccctggcccctctccagccttaagaagagccattctggtggctgaggacagaactaagcgaccatggagtgtgcgccactggcttgctccccacaggtctccaactacctcaactggatggtgaggaacctggcagacatggagctccagctgggggctgtgaagcgcatccatgggctcctgaaaaccgaggcagagagctacgaggggctcctgggtgagaggctcagggagaggggtggggaagagtccaaggaggagtgtgtctgggttgggggccacaagggagcctggggatggggtggcactttcggatactagctgtggcccatgcctggtggctgagcccagcccggcccccagcaccatcgctgatcccaaagaactggccagaccaagggaagatccagatccagaacctgagcgtgcgctacgacagctccctgaagccggtgctgaagcacgtcaatgccctcatcgcccctggacagaaggtcagagcacgggcccaacccaatgctgcaggacaggcgtgagcaggggatggggcatgcacggagctggatggcttcgcagtcacctcgtggccctccagggccgaggcctctcactattcagacatcgcagtctcctgccctgggcctgtgggggcccatctttcctctccttctattgccttcccccagtgctgccctcaggccttgtcttctcactcatccaccaaggagaccgacactctggactcccccagctcacacgggctttgtcagggcctccctctctgcgaatggtcaggggctttccctagggcactgccccgagcttcagggcagggacctgggggcagacagcgaggccacccttgtattgagggtgagcccctgcctatggccctggcccagctctcctctcgtttcccactctgtctctttgtctctgtctcactttgctgtggctgtccatgtcattctctgaccttgggatgtacctctgtccctgcctctctcatccttctatgtcactatctgtctccgtattgtaatttctgttggtacccaagtgccaggaagcaacgggatcagaggtggctccattgtagggcggggcacacagacacatccatgcataccactctcagctgcccctgtgtcctcctgccacacccatgcccatagagacacaccactgccccccagctctccttcagccaagtacccggcacacccagacccacaccaaggcccaggcaaatggacatccatgcctgcacttgcgtgccggtccctgtgtaagccctctctggacccactgcaggaaacaagcccaaacctgtggtgtccaaagagaaactagtcagaaaaccaggccaaaaagataccctgtgacctcccacacctgcacacacacccagagctagcatagaggctattcccagcagccccagagtcccagtggcggtgcctgcttctctctttccagatcgggatctgcggccgcaccggcagtgggaagtcctccttctctcttgccttcttccgcatggtggacacgttcgaaggtgagttgtaaggcgggcaccccacgtgtacccacagccaccagatgaggcctcagccctggcacgtggtcagacatgacaggaggcccagcagtcaccgccttcccctgcaccctcactgggacccatgcagggcacatcatcattgatggcattgacatcgccaaactgccgctgcacaccctgcgctcacgcctctccatcatcctgcaggaccccgtcctcttcagcggcaccatccggtgagccccaccacccctcaggcccacccagccccaggccggctcagttccatcagatctggagcacaaagaggagggggttgggggagaccaggatcccagaggtgtttcctgctcatgcccttctccatcccatcaggcccaggcagcctctggaaggggatcccccacccatgggtctaagatgctgtcccccacccactgccaccacctcggtgcttctcccagccagacctccaactcagtctgctctcgctcactgccctctttgccgcctggggatgcaggcaggaccctgctccctccctactggggctttctgtgccacttccagatttaacctggaccctgagaggaagtgctcagatagcacactgtgggaggccctggaaatcgcccagctgaagctggtggtgaaggcactgccaggaggcctcggtaactactcctggctatgcagctgggttggttgggcactcaaggaccctgtaaggatggcagacagaagcccgtgtctcaggtttgccccaagtttggagtctgaagcctggcaggaccatttagtcctacttctcactatacgggggcccagagaggtcaggtgtcttgccccaggtcacacaactggtcagttcagggtctggctcctcctgcagggtacagcgggtacagtcagggatccttgtgagacagagattgcgagtcccccatgccaagggggcatcttcagccctgccctgccccatccacctgcatgcccagttctgccttaggggaggagaagatggactgggcaatcatagacacgggtcactcatcaaggccaccggtgattggcaaagccttggtatatttgctgcagctcctggagcattgggggtggccaagccttggtttcaatgaatcaccctaccaaggccctacatacacactcagtgcacccctcagtgcacacgccccctcccagaactgcccagggccacagcagcacacacctccaggggtgcccttctcgttgcagtccttgcagacggcctccacattgttgtgtcaggtgcaccagccctgcacacgcctgtgctcttggacacacacccacctatttgcccccatgcacacattttccaacagccccccaagccatcccatctgctccactcacagcacaagattaactcagtcctacttcatctccccgggctgttttcagatgccatcatcacagaaggcggggagaatttcagccagggacagaggcagctgttctgcctggcccgggccttcgtgaggaagaccagcatcttcatcatggacgaggccacggcttccattgacatggccacggttggtcctgggcccctccatgggaccatggtcttggaaagggtttagtgggatgctagggagaaatttgcacgaagtagtcctgaggctcaagttgcctctaacatcaaatgctatgtgttgcagaaaatgaaaagagctggggggaccctgactctgtctagtcttagggaatgttacacacacacacgcacacacaaaaacactatgcaaacacacacataagctgcacacacagacccacacagacttcacactgtcacctatcacaacagcacacacacagccacaaccacaacctacatacacacacagagctgagctcccaacaggctgagtccagtccctgagtgccgggaacctgttcagtcctgtggggtgggggtgggactaggatcggggtcagatgggagctgagccacagacctgggctccacatcccccaagccaggccagaccccatccactgggcaggtgagccaacagctgttgcccccacttggcaggaaaacatcctccaaaaggtggtgatgacagccttcgcagaccgcactgtggtcaccatcgcggtaaggggcccattgatggggtgcagagggacacccagggacaggactggcctgttgtggccgtcatcagtgcacagcccctgggcttgcctggtcccagtaatcaagaaagaaccctgaagcaggcagttcagggcaaggggcctggagggcatgcagggagcctgggttgcaggatttggggtggggggttttgcccctgtgcttccctcagacctcccctctccttctccaggttccaaggcctgcccctgtcccaaggccttatatgttaggctggcgttacttctccataggaagtgggggaggggttgtggagggtctctgagccttgaagcctggaggtggggtagagttgggacttggagaggagagaagggtggtattagcagatggagagcttgtagtcacatccaccccaggaaagtgcagtccccacagtgacaggacattctggccacatgcctcatcctcctcctccaagccgcaggagggccaccctcagctgtggcccccaccgcgggtggtattcccaccatcctgacccgccccctcctgccctgcccagcatcgagtgcacaccatcctgagtgcagacctggtgatcgtcctgaagcggggtgccatccttgagttcgataagccagagaagctgctcagccggaaggacagcgtcttcgcctccttcgtccgtgcagacaagtgacctgccagagcccaagtgccatcccacattcggaccctgcccatacccctgcctgggttttctaactgtaaatcacttgtaaataaatagattt

SEQ ID NO: 15320 - DNA, 70394 bp, Homo sapiens
gcgcggcaggcgcgcggagccagcggagccagctgagcccgagcccagcccgcgcccgcgccgccatgcccctggccttctgcggcagcgagaaccactcggccgcctaccgggtggaccagggggtcctcaacaacggctgctttgtggacgcgctcaacgtggtgccgcacgtcttcctactcttcatcaccttccccatcctcttcattggtgagtgcgcgcagcgagccgcggaggaggggacgggagagcagggagggaggaggaggcgctgcgcgccgcaccgctcggcgtccccttccggcccgcgaccgccgtccgcctcgttcccggggtcccctgccctgtgtcctgcccgccggtccccgcactcgcacaccagctcatcccttcactcccccggtgcccccgatcccgcgccaaacacagcggacgtttgtgacccatgggatcaccaagttttgcttctgcagggccaagagctgggatggggaaaagggaaagaggaggtctcagcacgcagtgggaaactggagaggggtcgggcctcaccctccgtggcgcagcttagggagccgggtcacccctcccgcaaggcagcctccctgtcagccgcagctgggcctagggaagagggaagcctgtgctttggagtctgggatggaggcccagctaacccctatgctttcaccgggctgagccgcgcagtggtccgtgatctctgacagtcccaggcccgcgccctgggcgaggagaggcgagagctagggacttggattcccttcccccgccaccccacccgggcatgtgtctccagagcgcaacttctcaggctctgcgcaaagtagctccgactcgccgacgcagcgaccccggcgcccttgcttgcaaagttgggcgccacggccgggacaatcgtgcgtgcctctccactgaggtcccccccatctctctccaagaccttgactcttccagaccagtcaagtctatcaactcatagggtgtcccctgcatccccaaaacgtgttcattcactttaagaaaacaagcaaatcttaaaattcatatacagctttggggaagaaaggaaagattgtcacaaaattagatttacaagaggttgctgcagaagcagagttgctagttattaacaaagacagttagatagaaatagaaataaaacatacaaaatatgtgctcatatgtgcatcaaaaatcaaaaaagaacagcatttacacttctgttctcagccaaacggtttattaacctgatgacttgtcacacaagaagttagtatgtataatggggtaccttggcagggcacagtggcttacatctgtaatctcagcattttggtgggctgtgacaggaagactgcttgagtccaggagttcgagaccagcctgggcaacatagtgagaccccccccgccctttctacaaaaaattaaaaattagctgagcatggtgatgtgcgcctgtagtcccagctactcaggaggctgaggcgggaggatcacttgagcctaggagatcaaggctgtagtgagccgtgatcgtggcactgcactccagcagaggcaacagagcaagaccctgtctcagtaaaaaggtgtggtgggggaggtaccagcataggaccaggctgaatgagttggacgtttagtttgtgtgtaccagccttggggatcctcatgtgtaggtgtcaccctcaccatggacccaatgcccaagcacctttctggggttcatgcaccctcttcctcctccaagtgggcaggcatcctgcctctgactgtctctccctgcaggatggggaagtcagagctccaaggtgcacatccaccacagcacatggcttcatttccctgggcacaacctgcggtggatcctgaccttcatgctgctcttcgtcctggtgtgtgagattgcagagggcatcctgtctgatgggtgagtgactgtctgaggactcaggaaagtgaatctgctccagggtacttcctgaaaggcccaaggagatcctagctcacctatattccacaagcccatgtcttttgttactacatccagcagctcagtgtcttctatgtgccaacctctctgagctgggcactggacgcaagtgagtcccaggccctgccatcagtccaggagagcagagggaacacggacctgcatgccaagtcccagtgaaataatgctagagcctattagaatgccacaactccagtgaaaaatgtctggcctcttctacaacctgccggagttaccttcttggaaaaaaaaaaaaatctaaccatgccacccactcttgcataagacctttccttggttctcagctgttttgaagatgtggtctcagatcctcagcccaccattcaaggtcttcacagtcagccccacctatctctggcctcattccccatgcccaccttccgtttgggcctcacagcacactcctcacacctctgctacagcacagatcacactgtatgttaaagtttatgtctatttgcaaaactgtcttcagagtcagaaaggcctaagagttagaatctgagtcttgttcatctttgtgttcacagtgcaaggcatgtgataaacataaacattattcagtccataaacatttattgggtccttaggagaatgaatgaaaccatgttacaaataagtactctgggaggtgagaggaaggcagaattgggcaagctccatggttgagagggctttggagcggagtctggaagggtgactaggcttcagacacacagaggaggaaggagagagagaactggtggtgcctgagggaagggaaaaggcaccaaagagaaaagcaggtagggctagggagcagcgcaggggctggagcattaaacacaggctggggagcgatggaggctgaggctgggaacccaggttggggcatctcaggaggactgtgaatcccagcctgcatgtttgggtcggatttggtcagcagtttggaacagaagagagatgtcatcagcataacacttttaggtgggaacctgaggtgttcagcgcaggctggaggcagggagaatctagaggtataatagaagcaggacttagcattgactgcagtagtctaggtgagcaataactgcagacagaaatggtgtgtcagcagtcagggacagaagaggagcgggagcagccatctcactaaggaagaatccagtaaccagcaaggatgagagactgccaggagagggagtggtggaggagagggatatttggcttgagtatctgaggtccagcgccccctgagctggaatcagattatacccagactgcactcctgcagtgctgcctggctcctgtagttggatggcaggggataggctccctcatcctccctcccgttccccaccttcccttccccaatgtccctgcatcctggcttcagcagtgatctctaaaatacctgcttgacttggaggcagcagctctgcctgcttattaaagtccctagaccagcaagaagaccagaaggcatactgctacacaagcacgtgacaagtccgcctccacccccacccctacaccccttccaaagtagcacaaatgccacagtgagccctcagatgggaaatactcaccagatggtgacagagaaagacacctccgcccttggagaaggaagacctgggtcttcagtgagcactgctgctgtgtaccagctatgggactttgcacaagtcattcaggctttctgggcctcataagcatttataaacatacgataaaacattttagttgccaacttaaaaatgtgtgagaaagtataaggtgtttcaaaattatttcaaggagtaaagaggcaagagttttgaagatccctgggcagggtgttggctgttcccagtgtggccattcatgactgctctctggccttatgaaacaagcatcatagtccctggcttgcctgcttcatggggctgtggagggtgaaattcgagcatggacagggtgcagagcccggagtggcagagcactgggtagactgtgtattcccagaatgtgggaaactggaatgaatcggtccagggatgccctcctgctggctgtcagcagcccctcctgtgtgtggctgtactgcttcagctcagtgcaaagggccatctcctccccagggcacagatcagctcaagctgagtaattgtcatctggtctttgtgagctcctacccccaggcctgagtgaggggcaggaaaagagcagacaggagaagtcacagacccttgtgatacctccagtctaatccagcctgggttttcagagctgtctggaaatttagggggcaggtgggagggggctgattaaggcagccctgatttgatttagagtgagcctcatttagtgactaattaagccatcttaaacctgtagggcttcccctcttcctttgggtattatttctttctgtgatgttctgaattcagaacaatcaaaacagtataagttagtgaagaagatattttttaataactacaatattttcccagaccaccatacactggataaagcctgtatataaaactttacctaatttcttaactaattgaatgtgtattatttaacaaagcagctaaaaactattctatgaagccatgtcatgaaatatttagttcaattatggttaatcctcatcttatttcgtcttataaaattttaacatttctacctcctattgcaaaaaaaagcatttatatcagcatataataaaacatgtctagatgtcagcttaaaaatgtgtgagagagtagagggtgtttcaaaattatttcaaggagtaaagaggcaagagttttgaagatccccaggaagggtgttggctgtgcccagtgttgccattcatgactgctctctggccttgtctgtcttgtaccttctatattagtttgaagaccttttttggagaatattcactaaagaatatcaatatctaccatttcattaaaaaagaaatgtggagtttgccttttcaagttggtttgatgcttattgatgttttcagggacccagcctcttcccatctttccataccatcctgtgtgtgtgtgtcagcctatcttccccatggtcacaaggtggctgcctagctccgggtattgcttagcatgagcagagagggcatgctgccgacatgcctctcctttatgacagagatcattctttctttgacatctcactggccagaatacgtggaccaacactggcaaaggagtatggaattgcatggctgcttaaaccaatcaccatccattccctggggctgggtatattgctgctggagcaaacctgtggtcctcctggcacagaataaggggaagatactctttggtggacagcccacattgcctctacacttgcacctcagtcccaccagacccactgaggtcacaggatagctctcctcatgtccttcctccttctctgttgaactcttatgtatccttcaaagtccagcctggtgccacctcctctgggaagctgtccttggttgcccaccccctcctttgtgctctctcagtctctgtccatcggcagtatcacttccctagcctgctgactccaacagttagctctgagcatggcagccccctccataccatcagcttctcaagggcagggacccttggcacactggatagaagtagcctggtgggcaacagcagcactgaggcagcaagctgtagcaggccatctgggaatggagtgggtaccacagggctggagcagaaagggcaggctgggcagatctgataaagtggctggaggccacatagcctgggcctttcgttccaggctgagcagagtgggttttgctgtctgcaggagggagctgtggaagggcatgatcacgaccaactaaggtgaccctcctcaccaggcccagggaagactgaggcctggaaggaggctctggctgcctctgggtcttacccccaggccacagtccacccacttagaggcctctgtgagttaaggtggagagactatgagctggtattgactgctccattccccatcccgagagaggagacaaaatcagtgaccttggaaatgcctcttcgtgcctcagtttcctcaccccataaaatgggagactaagagtacccactcgatggggtttaatgaagattaaatgggttaacatatatcgcatgcttagaacagtgcctggcacagagtaaatgctccataaatactgactctcatcagtttgttatcacagcctctggggagggcgccagtgctgacttatgctgttcgtgttaaatggggctgtcactgggtgagttgtggcatacaggcccctgcactgttcaagagaccccagcaacccttgtgcttagggctcagcacatagtaaggcctccagatcatatacccagctctactccatgtactggcagctctgcccagcccataccccaaatacgcccattaactaaagggccctgcagcctataaagtgatgctataaaggttcagtgttcagcctttgaaattcaaggcctgggctgctctattgcagtacttagcatgtccccatcctgtctgtttctctctcccatctcagggtgaccgaatcccaccatctgcacctgtacatgccagccgggatggcgttcatggctgctgtcacctccgtggtctactatcacaacatcgagacttccaacttccccaagctgctaattggtaggtgaggtgtaggagggaggggcagtaccttcattcatttcttcagataatgtttactgaggactcattatgtgccagctattgctctaaacagtagagatttggaatagaaaaagaaaaaaatccctgccttcatggagcttacagtctggtgaaggaggatagacaggcaaagacagtgaataaacaagcaaacaaataggtggtggggatgctatgaagaaaatcaagctgagtaaggggtaggggcaatgacaatgttgctatctacacaggatggtcagggaagggctgtggtaactgtgggcatgcagatatttgggggaaggtattccctgcaaggggagtgacaagtgcaaagtcctctgatagggatagatttggcaaagatgtcactgtgggcaaagccaaatgagcaaggggaagagtgggaggtgagggcaggcgtcaggagaggagcgagcaagagtcccaggctctgggcctgagagcctgggtgaactgtggcatcaataactgatgtgacagaggagggggaggtgggctgtggtggggataaagttttctactgggggcatatcgagtttgagatgtcacagagacagccaactcaagtgtcaagttgggctttcatggggaggtcaggacaggagctacactttcaggaggtgggccttgtagatgacatctaaagcttgagcctggggctggctgccgtggctcacacctgtaaccccagcactttgggaggccgaggtgggcggatcacccgaggtcaggagtttgagaccagcctgaccaacatggagaaacccccacctctactaaaaatagaaaaattagctgggcatggtggcacgcatcggtggtcccaggtactcaggaggctgaggcagtcaaatctcttgaacccaggaggtggagattgtagtgagctgagatcgcgccactgcagtccagcctgggtgacagagcaagactccatctagaaggaaggaaggaaggaaggaaggagggagggagggaagggagggagggaggagggagggagaagaaagcttgagcctggatgaggtcacctggggagagaagagaaaggctctgggaccagagcttgaggtttgctaacatttagagagactcgggaaggactgcccacttagagcttctgagatgttaaatactgcaggactggggtcccaggcagaagcaacaggatgatggttggtgtttactgagcatgtgccatggggcaggctccatgccatgttccttacattcattgtcccacaggctaattcccccagcctccttattggtattgttaatatccccattttccagtgtggaccctgaaactgagaggttaaaaataataacagtaaatactcactttgtacttactgtatgccaggccccatcctacctatgtgatatattaattcatttaatccttgcaacaactctatgaggtaggtaccattattattttccctttacatatcagaaaactgaggctcagaggttaaataactggcactagtctagctcgtcaaggggcacagccgggagtctagcatctgtgcaatctcctaatcatttctgagactgcgtgtctaagggccctcagacttcgtccttggggtaaaggtatcaatccgcaggtctgcctctgtgttggggttcagcctgtgtgtctaaggctggggctgtacatctggcagttagactttgttcacactatgtccttaagtcagactgatttttaggtatcacagcatcgaattgacatttggagtctggcacactctgtgctaagccagtgacatcatggtgttgtcagggagtacagggtgtttcttgcactagtcacaggtctgcctttctgtagaaggtgggatctgagctccattaggattatccaggtgatccccctacccctagcccaggggcccccacatgagtatgaatgggagctgggggaagcaggttgagaggggagatgttaaatacaggcttcagagagccaccctgcttccatttctgaagtagctccttgtctgtagagaacccttcattaaccagggcctggctgaccagtgtcctctggaaacaccctgtctggacatctgaggagttcattttctcattctccagcaaacacataatgttctctctttaaagcacaagttatcacccgtggatggatttgtccttttctaaggaacaaagactaactccctccattccccttgttggagttatctccccttgaaaggacactccacagagccagaaattctagaacagggaaaagtggaggggacgtgcctgtgaactgcagggacagaaggaaatgggtattgggagaatggccagccctccaaggggctgatgtctggcctgggtatggagtcccacagaaaggggacctgtgatgcagcttacattgtcccgtgagggaaccatgatcctggaacccagatgaggccaaggaaatgttctctgaaaaagtcatatttgagctgagaactgaaggaactaactgggagaagggaggaaagagtgcttcaggcagaggaaacagcatgtgcaaaggccccaaggcagaaggaacaaaacacattagaaaattcagaagaagaagagtggcgtgggtgcaaagtggaggggagctggactttgggttttgtttgcttgtgcccaggctggagtgcagtggcaccaccttgggtcactacaacctccgcttcctgggttcaagcggattcttgtgcctcagcctgctgagtagctgggaatacaggcgtgtaccaccacactcagataattttttgtatttttagaagagttgggatttcaccctgttgaccatgctggtcttgaactcctggccttaagtgatcaggtctcaacttcccaaagtgttgggattacagccgtgagccaccgcacccacctggaaggtcataccacagatgtttgcctttatcccaacagcaatgggaagttgtgtgtgtgtgtgtgtgtgtgtgtgtgtgtgtgtgtgtgtgtggtttaacatgtttaacataaaatttatcatcttaactgtttttaagtatagtgttctgtggcattaagtatattcacagccgggcatggtggctcatgcctgtaatcccagcaccttggcaggccaaggcaggtgaattgcttgagctcagaagttcgagaccagcctggccaacatgccaaaaccccgtctctacaaaaaacataaaaattagctgggcgtggtaatgtacacctgtagttccagctacttgggaggctgaggtgggagtatcatgggaggctgaggagagaggatcagttgagcctggaaagtggaggctacagtgagccaagattgtgccactgcactccagccaagattgtgccactgcactccagcctggacaacagagtgagaccctgtctcaaaaaaagaaaaaaaaagtatattcacagtgctgtgtagccatcaccactatccatctccagaactttttcatcttcccaggttgaaactctgtactcattaaatgataactccccatttctccctccttacagcccctgacgaccaccattctactttctatctatgaatttgagcactctaggtacctcatctaagcggcatcatgcactgtctttttttttttttttttttttgagatggagtcttgctctgttgcccaggttggagtgcagtggtgcaatctcggctcaccgcaacctctgcttctctggttcaagcgattctcctgcctcagcctcctgagtaactgggactataggtacctgccaccacgcctggctaatttttgtatttttagtagagacggggtttcaccatattggctaggctggtctcaaactcctgatcttgtgatctgcccacctcggcctcccaaagtgctcggattacaggcgagagccaccttgcctggcctatttgtctttttatgacttgcttatttcactgagcataatgtcctcaaggttcatccatgttgtagcatgtattgaaatttccttcctttttaaggctaatattctactgtatggatatgccacattttgtttatctattcgtctgtcagtgggttgcttccacctcttgactcttgtaaatagcactgctatgaacatgggtgcattgaggggttttcgacataatcataataattgctttatggagaccagcttggaggagaacaagatggggaggaagtgtggaaaccaatgagaaggctctcagggtatagcgggaatacagaggacgcatgatgatgcctggacttaggtggtaccacagggatggagagaagtagatagagtcaagctatttaggacgtgaaatagacagcatttgttaatgggagaggtgtggggcgagggagaagaatagagggagaaggaggagtaatgggagctcaccagcagcccccatgttatgcctctttccttccttttccctcttctctcatcaggcattcagcttttgctgagtacttctgtgtctgacaacaggctgagcactcagcactgcaggacaggactatgcaaaaaacctctgggcctagtcctgggtgcactgctaattccctgtgtgaccttgcacaagacatccaagctctctgagcctcggattccccacctgggcaggaagagtaagtccctgcctaagtcatagggttgtaatgaagagcaaagcagaccatatctgttaagtgttagggacaagacaagcatgaggcatattttcaagtctcggctcctgtaggcagctctcactaagggctaaagggcttctgatgcctgggatagaatctgtccggcagagtggagtggaggcagggggacagccttcagctgtggaattcctccagtcctagagaccagcctgagctgggggacattattccagtcctgaggcatgagagcagaaggccgatgcttctgccctccatcctaatgtcctcctgcagggacccaaggtggatggcatcgatccccccgggtgagctcagccctgggcgcatggtggggcccaacatctcaacctgtttcctaaccctgagccaggcaggacagatcccagatttgtgcccaagagatgctctggcatccatgcccaggcccacatagggatagagggcagggtgaaagtctctctccctcactcgggtcctctggagaggggctctgtgtcatgaagctgaccttatccgcatctggtctaggagggaggagggaaggagctgccagtgctaaaatctcccccaccctcaaagggggacttcacaggttattgctggttttggttgttggaagctgacagtgatttattggcagattgaagtgagtgtgtgtgcgagaatttaggatagaatctactgatagcttctgaggtttaccttccccaggtcttaaatctggagataataaaaatataacagctaatgtccaaagagcacccgctgcgtgtgaggctcactgcactaaatgctttccatatgtttctcacaagaaccttctaggtagcactattatgattcccacttaatggatgaggaaactaagctctagaaggctaagtgactaatccaaggtcacacagctattatgtcacaggctctgagcccaggtgtatctggctgcggagccaccaccactaacccctgtataacgctgcctcacagaactgtggctggctctttccgtatcccccatgcccctgctccatcatcatgctgtggtgggctctgaactgtgaggacagggatccaggctttcaccctctctctgtccctagctgccagtgcacttgggcaaggtcacatcctatttctgggcctcagtttcctcatctgtaaaatgaaaggctggattgaatgacctttaagatttccctcacttggaaattccacaagtaagtcattatagcatggagcttgcatgcatgggctccagcgtcaggccagcccagctctgccagttaatgggtgtgtggccttggatctgttacctaacctttctgagcctcatttcctttgtctgagaaattgggggtgacggcagtgtactttctttgaaaagttatggtgaggaatagataagatcatgtgtttaaagtgcttacttggcacagtgcctgtaacttagttaaattcaataaataaatttcccattcttcccatgatcatttatttttaagggacatttgtctgaccagtttgatttatgagattattggtgtttttcatgaatgttaagacgtacgtgcgtcatcttagagtcatgtactctgatatattcacacgtgcacatccacttactcggaaatgtacacacccaggcacgcttattctgtctccttctctgccacatacttgcacacattatgtgagtgtacacacatgatgcacacacgtctctgcgatcttccatctctcctcggcagccctgctggtgtattggaccctggccttcatcaccaagaccatcaagtttgtcaagttcttggaccacgccatcggcttctcgcagctacgcttctgcctcacagggctgctggtgatcctctatgggatgctgctcctcgtggaggtcaatgtcatcagggtgagggtaagcaggccacctgggccagggtggggtgggaagcagaggctctggcctctgtcctgccctgggttcaggcccccaccctgcttctcagccaaactgagaagggatcagcttgttttacccgcccgtgtaaaggggagtggggccgtggcggaaatttcaggatagacactgcatctggcccacgtgtgctctaccccagggtcccagagggagaggggggtgatgggtgtgttcgctgaggttggcggatgactttccgtagaaagggaagataagcatcaggcactggcctctcctactttctttcttcgggggtgggggactttgctttaatgtattcatatcgtcacgctggtaaatgaatgagtaagtgttttgttttcctttctgtttgctcccgcctccctctctcttcctcaccccagactccaaccttccccttcccctgcccctacctccccaggcagcccagactaatgaactcgtttgtctttcccatgctttgtttttattagtataataccatatgtgtctgtctaaataaatacctattcaggttttttcctctcaacacaagtgaatatgtaggtttcccccacggtatttatcttgtaagaatgggatcatattatgcagttttctgcactgtgcttttctcacccaacaaatatctcttgggactccctccaagccatctgatatggctaattccgttttcttaatggctgcataatattccatcgtatggatgagccataatgtgttcagctatttctctatggatgggcatttactttgttgccaagttcttgccttcatgaataatggtgtgttgaacatacttatatatttatgtattgctgcttttatttctatgggagagagtccaaggaatggcgttgctgggtcaaagggtctgtgtattttaaattttgatcagtgttacatattgccttccagaaagactgtaatctgccagcaatgagtgagaaaaccctttccctgccttccaaccagcagtgagggctacagccctttcgaacttggactgcctgcatttctctgactcttctgcttttagttggtgatctgcagggcacaaagctccttatgtgtccccccatccagtgaccctcacaggaaccctgtgatgcaagcaccatcccctttatagatgaggaaacattttagatgaggcttgtccaaaaacaccttgctagtaagtggaggaggcaggattcaaaaccaggtctgcatgacttggagttctgtgaactgtatatgaaacatggtggtatccttagatctgtggagaagatagcatatgagagattcctgctcctccccaacccaacctaaacccaacccagcctagccatggggggttcaaagtcgacctcaatgagcagttacaaagtcaggatgccctgacattggtggccaagaagtgttggggaatccttttcctggtaataattacaggcgaaagatggccccatctgttagagatcaagtgtggaatatcacaaccccagatccttgctggggcaaggtagggagtggtgagaagttggacttacccatcccccatggcccatgtgccccacagagatacatcttcttcaagacaccgagggaggtgaagcctcccgaggacctgcaagacctgggggtacgcttcctgcagcccttcgtgaatctgctgtccaaaggcacctactggtggatgaacgccttcatcaagactgcccacaagaagcccatcgacttgcgagccatcgggaagctgcccatcgccatgagggccctcaccaactaccaacggctctgcgaggcctttgacgcccaggtggtcagtgggggcacagccacaccatctattcactgccttctggtttagggtcacagagagggacctcaaagggcattaggtcaaaatcctggtgggacaagaggggaaactgaggctggtgaggggaagaagcttgccttaagtcacacagtgaaccagggacaggtgcagggctgaggattcataggacaggcacagttggaatggcccttaccgtttaggtcgtctagtccaaagtccttatccagatggggaaactgaggctctgagaagggaagtgaccccactggactctcacatccctgtgctctttcctctgcagcttactgactataaaggttggagtgttcacttgatttggagcaggggtgttagtggcctgatccttatggtaactctatgagttgagccagacaggaatctccccatatcactgaggagcaaattgaggccctgagaaaggctgtgacctgcccagagctggccacagctggcaggcggcagaggcagtctcctggctcccagtccagtgctccttcacttcctctgccctcgcaccagggcagttgctgaggcagacacggtggcaggtggtaatgagtgagtgtggcacatggccacctcctcattccagtgctgtgctcatcacatagtccctgaccagctgtgtgaccttgagcaatcatctggccttagtttccccatctagaccatgttggtgttgatagggccctcccaactgtgcacttgctgattccatgatctcttcctggagttcacctatttgcagaggatgtgaccactgggtttccccagacaacaggagctaggggcatcctgggaggctaggcccagccgtgaattagccctcaggcactctgacctggccatggtctctctgggcagcggaaggacattcagggcactcaaggtgcccgggccatctggcaggcactcagccatgccttcgggaggcgcctggtcctcagcagcactttccgcatcttggccgacctgctgggcttcgccgggccactgtgcatctttgggatcgtggaccaccttgggaaggagaacgacgtcttccagcccaaggtaggcagccccaggggtagggtaaggcaccctctagatggttttcagttgtttctgagagtgcaacaggccaatgtgtgtgagccatggccacactggagtggctcctcacacatgcgcaaagcccatagcagtatccccaccacagaatactctacatctggtcaacagaaatgccagagggcgagcctatgccccaagggtatcctactctcctctcaccgtcactaccatagtacctctcccggtagttaggtcagtccgaaaactgcaggaagtgcttttgtttgtccagtgtctagagcttctgtgacttggatttgttggctttcagttcatgtcatcttagtaaactctttaaaagttttcaagatctgtcttcttcagtcctgtaaaggctggcacttgagctttctgcaggggcatcttgggagctactgtcagaggagagagaagtgggaaaccctcacgagtggagctttgtctctccccactccaaatttcattcaaagctgcccgtagttttattaatatgttggacttttccattaaaatttcttttttaagaaaagtttccatggcttaaaaaacactggagacttattagactagattatatccaatggccttggcagttgtaacgattctgcaaactgaaatttgttggagctagaaaacctttccccggggttatttgccctgcgtggggccgtagcatccacttcgggggctgggcagactgtgctctgttgtctgtttccttgcagccgtttaggtttaaatggccacaaaatgaaaactttttcacccctaataagtttcagagttttagtttccaagtgaggatgtcattataacattttaaccacagacagtctgaaaataatgcagagaatggggaattagggtttttaataatttatgacaccctttgcgtaacatttgttcatctcatgagctccaaaatcgcagccagcagttaatcctcaggaggtttatgttcatttttctggagacataattagtcagctgaacagttttggccacagatatgagatacgttgagtctgatttatgcagcaaactttcattgaacactgctgtgtgccaggcctgggttgggctgtgggaatatgaaagcaatagttatgatgaggatgattaacaatattaacagccacttactgaccacataatacatacctggctgtgtgcaggagttatccatgtgttatttaatccctaaaactatcctttggcgtgagtatattttgcaacatctttactgtggtatacctcaaatactgtacagtttatgagatgataggtattcttatccccattttacagatgagaaagttgaggctcagaaagtttaagtaattttccccagggtctctcagctagttaataacagaggcagaatttgaacacaagactcactccacagtctgggcatttacagccaggaagctaaattgactattattatcaagccatcacctctggctccaaggattatgaaatccaacagtgaggagagaaatcaaaataaaatacttttatgctatgtgttacatgtgactcttaggaggaatattcagggaattgtgggaaaagatagtgattaacttagccagtggtcatgaacagcttcatagaggaggggatgtttgaaaggggtcttgacggatgagtaggaatttgccaggctgccatgggaagatttcttgctcaaccaagaatgcaaggaccacttttgcttatttaaactttgatggcttttgaagccatatctggctttttgagcctctctactttacctggcccataaaagagaggggaagcggctgcttctcttgtctacaggagtgtcacctttggctctagcctgaccataggctaccccagaatacccccattggcgatcctgaagcagcatggagccagttgttaatatcagggggaaatggcacaggccagagcccttatcagagtgtccacaccacgctcttcttcctgtgtttcccaaaacccttgtgggattctgctaaggagagagctctgaggcaggacgtgccaaagagatggcgaaagcacttagaattttagttcatctgaacgttatcattgccgtttttttctctttgtttatacacaaaccctggggtttattaccgtctcattggaatgctcttgtcccagttacttagcacacaaatccctgagacagatggccctgcctcagtggcagtgggccttatcagatttaatattttttccctgcagcccaaacacaatcagaaaatttccgacacagaaacaagagttgaaagtaaatatagtctccagtgtccgcaacaaagaactctccatcatgtggttgcctgggatgtggcttaattctcatgtgggcttctgagctcagaaaatgggggaaagggatcatttactgagatcatttggttcatctcccagcccccaagccattctaatccagagagaaccgagtgctattctggtctttatgaatgacaaagaaggaagctccctagctacatgttgcagtgtttcacagtctgggagaggaagccgttttttctgcccagcctgaatccatcctgcagcagttggcacagcgaggcacctgtggtttattcatcatcactcttccttcctaagatactcagagttggcaagaaacatgtcatccttggtatccgcaaggacgaacatttctgatgtcctctttagttactgaaagtgtctgtgacttgccagatctttgatgctcctgtcaccccgctgccactccccagggaaagctgggacccaggttgggctctgcctatgatctatagctctttccagcctcctctccaacccaacccctactcccaatctgtcacctcccatggatgccactgatctggctgaaggacaagagaattagattcataatgagctgctggtgtctgaaacctgccagcactgccctgggctatcagttgagccaaaggaagaaggaacagtctgggtttgatcgaagggctaaagcttcaaacagcctctaagtctcagtaggaaaatgtgtaggtttgggagggtgtatgtgtttccgaatgagttcccctaagaactgcttatggttctatatgtgtgttctgtttgtccctgtgtcttttggtgtgtctttttctgcgtgtgtgtgtgcatgtgtgtgtgtctatgcccccgtttggattgccatatttgtggctatcattatgagtgacttaatgagtgtatatgcattggtgtttctgtgactttgtggttttgatgcatgggctggcctcttcataaccatgtccatgcagctggtctggcctagagtacctgccttcaattcactagctccttcttggccatcaagactctgctcaaatgtcacctgctccagggagccttcacctggttgaattagatgccccttatctgtgctcacataacatcctatcaaagcgccctgtttctttccctgacttgatcctctgtcccctattgcctgacctctgtgtgcccagcactcagcccactgcctgacacccaggagatgcacgggaaatggttctgcaaagaaggaataatgcagcaattactatatattgagtgcttacacttactgttttttcacatgcactgttacattgacttctcataacaactctctgaagtcccttcatagcctcaccttacagatgaggaaactgaagctaagagaggttgaggaacttacctaaggacacagtggctaatatatgatgagtcaggacctctaagtccaggctcttaaccaccgtgtcaaacagtcttgtatgaatgggtaggtgtgttggtctctgggtggccaaagataattttattctttacccagggcctcccggggctgggacctacggacaactcaccttttgacacctgccaaaataggaaacaagagtccaagtgatcccctctcctttaagcaccagagaacatgtgaaggggacctttccaatcatacctctggcctggcagagacaatggggctccaaactgtagagtcgggagtgctgggttttagtcctacctctgcagctaactcatttattctcctcagcagtcacattctgcaagcctcaaatgcaaaatgtgtaataacttctgtagaaagtacatgggggcatgaagatcattggcttgattgcttttaaaaaatcggtattgagcactactggggaaatccctggaaacaaacacaattcttccctgagagcttgtgaaaatgcaagactagggcctatgattttccaaagcattttcttccaccaagtgtcaggttgtaggtccttggtcttttctctcttgccttggtacctgcagggtgctgaccagtgctatcatatcccctccccgtttcctaggaccctcttctcggtagactccaacagggcctgccttccttgggcagcatggcaggcctcttggctagtctagtacccacttcttttttttttttttttttttttggatggagcctcactctgtctcccaggctggagtgcactggcgcaatcttagctcactgcaacctctgcctcctgggttcaagcaattctcctggcccagcctcccaagtagctgggattacaggcatgcatcaccatgtccagctatttttttgtatttttagtagaaacagggtttcagcatgttggccaggctggtctcaaactcccgacctcaggtgatctgcctacttcagcctcccaaaatgctggaattacaggcatgacccaccacgcctagtcaggtacccacttcttaactgaaacttagctattccaggttctatcccttttaaaccaactctttgaagagaggtctaataatgacccaatgacttatagctgcagtgagatttttattttaacaggtcacaaaattctcaatccacaaaagtagatttctgaccctaggttattttgttgggggcggagagaggaagtcaaaggttttgcagcctttagagctgcaaaaccagaatttgttgttttgttaaaaatgcacaaataccgacgagtatatttaagtaacacccatagtctaacgaacaaacatgatcagttggcttttccagccctcattctccagcctgtgtgttttctgctcattgtaacacagcgtgtgtgtggcattccatgtttctccagagctttcatgagaatcagtggtcttggatgcatagtgttcccatgagtaccttaattacctaaccattccctgtggttggaaatttatatgggtttttgcattctccttctgctctgaccccaaaataaatgtctgtgttcatacagctattaccttatgtgaaattattttctttgggataaattctcatgatgtgttgttgctttaaaatagtggactccagtctccagagctgcgtctctgcagaggacagtgggacagaagaatcccagggcatgttaaaaaggaccgggtcttcctaaacccacatgcctatatttctgacccagtaccagccaggggggcaagtttccatcccccacaagtcacaaacctgtaactgacactaggatgcttaaggtcaaaggcctggacgaggcctagacagtgggtctggggtagtgtttttgacatcactcaggttcatgttcacatgttgtccccttaccagcatgtgaccttgggccagccactaaccctactgaaactcctttttttcatgtatgaaatggggctaataatggtaccctcctcattagggtattgtgaggatagagttttgcacctgataaatattgtctcctgccccttcctcccctggaaattcaggtctctccctgcagcctaattttaaggcccatttttctgcttccagcccacccctgcccttctaccttcgacctcctccctctgcctctccctctggtgcactggcaaatgggacagagagcctcggtagggccttcctcttagagtcttgcacgcatccctcagtggtctccctgtggctgcttcctgctgccaccaacagatacagacccctgtcgcacagatcatggtagagacagtggtgagcaggaccagacagctccagggagcagtgagggctggcttagagaacctctgttaaactgagaggccaccatcaggaagctctgatccaagatccaggaatccctgactctagggaaaggcctccaatgagagcctgggccctctctgcctgattctgattgtggatgtgccctcaaactccttctcatcactttgttccatccctctttaccctgcagcagctcccacaccctgccaaacaggatgcacagtccagggcagtgtctgagaaagagcagagatctgtcttcatggaaatattgatgtggctctgctggggagcaatggatttatcaagatcaaagttttcctgggagttattgatgcttaatttggaaatagacacactgttgatccctggtatctttagcaacaaagttaaaatgtttgtttttcttcactggttgccatctgagatcttgccggaagtacacaagagaaccttaaatttaacaggaggccctgggagcccatgaggctggcgggcttgggtctgaaatcttttcagtctcttgtaagtgatgagctctcattctctcctgagagctctacggtgccatgttttccactggccttttctgctcagtaattgctacattacaggctgttggtaagttcggaacaagggagctgctgattccatttctgtagcagagaacatgcaccgtgagacttgttgtaccagttcaggttttaggtgctctatttattcttgccccattcagaatgctctcccctgggtctgtggccacaatgctaagagtcatatttatgggcctgcagttgtaattgggccccattctgttcccccaagtggaaagatgaacagggtgtaagcaaccttccctgtagttagaaaaacgtttagttggatttatcagtctgatttttcactcataaacaattgcacaagcctttgcaagcccagagggtcttgtaataatgatggccgtggtccattatggcacagtgatgtgttctacggtggtcattttgctggcaatgacagtcacctctgaacttctctttccaacagacacaatttctcggggtttactttgtctcatcccaagagttccttgccaatgcctacgtcttagctgtgcttctgttccttgccctcctactgcaaaggacatttctgcaagcatcctactatgtggccattgaaactggaattaacttgagaggagcaatacaggtacttggatgattattttttcactttgccataagaaccattattaggaataatgtccatgagtgttattcatcctcatggacactcaagaataattctgctgtaaatttattttttgttgcccattaacgatgttttaaaacagtaaccattgacaaggcagtgtgggatagtggaaaatatcttgggctgaacttgggagacagtgtagctctggctctggttctgccttggactgggtctgaaaatccagctgctcagcccttggcttgaaagtggtagacgtcactaattgatcacagcactctttctgaccaagggtaaatgcaaccttggaatcctctctaagtggctgttccagagttctgctaccagacagtcttctttgggtgtgaaaaaaggaatgtgcttgacatacaaggtctagatagcctctaagacagggtcccctctaagatggggtattggtccatggcctgttaggaactgagccacacatcaggaggtaagcagtgggagcaagcattactacctgagctctgcctcctgtcagatcagcggctacattagactctcataggagtgcgaaccctattgtgaactgtgcaggcaagggtctaggttgtgtgttccttatgagaatctaatgcctgatgatctgaagtggaacagtttcatcctgaaaccatccctctcccccaggtccatggaaaaattgtcttccacgaaaccagtccctggtgccaaaaaggttgaggaccactgctctaagttctatttgaacccttaagtcttgctcactaatgagagtgacctatttggtctgttgggtcacttaagtctaggctcttggtcctgccttctgtgatttccttcttagagtttctggaaagatgatcaaagccagggagtgttcagggcccctctgaagaaggtgatgatgagagttgtccaagtcccagggtcttcactaggattttggttcagctatcagactagagagacatcctgattgagagtagtttaaatgggatagaagtttgtttattcttcagatagagtcagggctgacacaggagctactcaatgatcagagacctggcttcttctgtcatgttgctctgccagccttcttttgtgacttttgtctccatagccatggtgggtattgaaactgccactatatttacatttaaactagccagaagaagggacaagaggagggaacgcattttccttttaaaatggtaatacctgatttgcacataccctctcgcatcccattggtgagaaagtggccaaatggccgtatctagagagtctagaaagagcttggtctttattcttgacagctatatatgcactgctagaaattctctgtgcaaagaggagaatgggcattgggaataactagatgcagctatgcctagtgatgtccatgaagttgtggtaaaatcctgaagctaccttgttctttggaaatgttcctcagaatcattaacattagtcatgtgggagacaggagaagaagctctgcagaaaagggaccgagaggacaaggatatagcttgggctggggacaatgtcagagtccaaactctggctatcttggaatagtctgtgtgaacggtgccctcccaagttgtgcagtgcacaacctgtgcagctatatatggcaaccctgcccatccccagtggtttctcactgggaaagcagagtatttcctcagggatgtcattatgtgacaatagtggaaaaagcccaggaaaatctaagaccttctaagactcatgggggcccagagctgggaggaaccaagctgttgctcagttcagaaaacttctctagaaatcccagcctctcctcacacccctccagtgacaggcagacttgcaccaccacaagcaacagccacttttgtggttgggcagttttgtaattaaatatactaatgtgtgtatgtcataaattacattttccaattatgccaaaagagccaaaaatggttttttaatggttagcatataatcgtttttatcaaattgcttgaatctttcatgttaataagagagattcattactatgccacaaaaagcaaatactggcattaattatagaaacaaattaggggggtggagcgcaatggctcatgactgtaatcccagcgctttgggaggctgaggcgggtggatcacaaggtcagaagtttgagaccagcctgaccaacatagtgaaaccccatctctactaaaaatacaaaaattagccaggcatgttggcgtgcacctgtagtcccagctactcaggaggctgaggcaggagaatcgcttgaacccagcaggtggaggttgcagtgagctgagatcgtgccactatactccagcttgggcgacagagtgagacttcatctcaaaaaaaaaaaaaaaaaaaaagtggctcatgcctgtaatcccagcactttgggaggccaaggcgggtggatcacaaggtcaggagatcgagaccatcctggctaacatggtgaaaccccgtctctactaaaaatacaaaaaaaaattagccaggcatggtggcgggtgcctgtagtcccagctactcgggaggctgaggcaggagaatggcgtgaacccaggaggaggagcttgcagtgagccgagatggcaccaccgcactccagcctgggcgacacagcaagactctgaaaaaaaaaaaaaggaaagaaagaaggaaaggaaaggaaagaaaggaaaggaaaggaaggaaagaaagaaagaaaggaaagagagagagagaaagaaagaaagaaagaaagaaagaaagaaagaaagaaagaaagaaagaaagaaagaaagaaagagaaagaaagaaagaaaaagaaaagaaaggagttagggagaaaaaaaccctttctttctttcttttggagatttccggaaaatgtacccttacggatgagagcctgtgtcttcatgggttagagaataaccacgctttgtgcataaaaagttattaagcacaattcctgaattatacataattactagctgtcagtcagttgtgcatttctgtgtatgctggtcttcacttaataagactttatttcacagatcacttggtgtccctacttcactgaaactaggtgattatcttttgaagtctcatttcacataacctaggaggtatatagatttctttaaaaatgtcattgccattattttaaaccttacccatggtatatataaacttacagaaagacagaataggttcattattttaaaccttgcccatggtgtatattagctcacagaaagacatagaataggttcctgccttaagaaaacctgacccacaaaaaagcctgggtttacacaaaagaggaattaagggcggggagcccaccttacaacagaatgaataatagaattttatccaagagcaggcatcctgaggacatttaagacccggatgcatttttccttgttcaagagcacacatccaaaaattgcagtctttctgcgagtcatgatcactctgcacataaagcgtttaggttcagagctcggggaggccattaccatggctgctctctgtctgccctgtgagggtccttggggtggctgcactctggggatggtgctggggctgactgactcacgcggtcgtgtaacacatcagaccttccaaagtcgaacccttgttttgtttcaaggctcaattatgacaggacttggtctcagagcagatcccctccctaggctggagaaggccactttaaaacagatggcctgccccacttcatcatttttatggctctgatctgtgttctccactggcctctggtaaatcaagaatacaagtggacatgaagatctgctttaaaaaataaagaacagaccgggtgcggtggctcatgcctgtaatctcagcatttggaggccgaggtggatggatctcctgaggtcaggagtttgagaccagcctggccaacatggcaaaaccccatctctgctaaaaatataaaaattagctgggcatggtaggcacgtgcctataattccagctactccggaggctgaggcatgagaattgcttgaacccggaaggtggaggctgcagtgagctgagatcatgccacttcactccagcctgggaagcagagcgagactctgtctctaaataaataagtaaatgaattaaattaaataaaaataaagaaccaattaagtcctgtctacaggaaaaggccttacttgctggagaagtagcttgctgtgctggagtagactagtaagttggaacggtgatacagtaccaccttacagagctgctctagggcaccatggggactgtctgagaagcccctggcacactgtaacaggtggcatctggtgtggtgatgatgatgagaatgatgatgaatgtgaaacactctgctctcatttctagaccaagatttacaataaaattatgcacctgtccacctccaacctgtccatgggagaaatgactgctggacagatctgtaatctggttgccatcgacaccaatcagctcatgtggtttttcttcttgtgcccaaacctctgggctatgccagtacaggtactagatgggctgaggggaagggaggggggcagcaggacacacaaccagaatctgctggtccatggccagtaactaggagcacaccgtcttccactccatgcttgcctgtacctttcacacacttggctataccacaggctgtacctctgggtccctcctgtcccatactctgcaagcactgaccatctctcttaatgaccagagaaggcagtatcattaagactttaaaaatggagccaactttataaactatagaaaaatcaagccaggttcaggggctcacacctgtaatcccagcactttgggaggctgaggcaggaagattacatgagcacaggagttcaagactggcctgggcaacacagtgagaccccttctatgcagaaaaaaaaaagaagaaagaaaagaaaaatcgtacatggaatgcccacagatcttaaaagctatgttgtagcaaaatatttaattacatcaaaaagtgttagtgatgtatttttaagcaaaaagagtaagttacaaatagtatatgttgtatgcttactactaaactggaatatatgttatgtatacatttgtacagattcacacatgaaaaagaattggaaaatcacatagtgggattataagtgatttttattttctttatgtgtttctaaattctctaataagcgtgtataagatttggaaatcaacaacatgatacttttagcctaggcaacaaagtgagaccctgtctgtacaaaaaattagctggaagtggtggctcacaactatagccccagctactcagaggctgaggtgggaagattacctaaagtccaggaggcagaggttgcagtgagctacaatcacaccactgcactccagcctgggcgatagagtgacaccttgtctcaaaaacaaacaaaacctggtgttttttagccagatgtggtggtgcgcccctttagtcccagctacctgggagtctgagatggaaggattgcttgaccccaggagttcaaggctgcagtgagcaatgatcacgcccctgcacttcagcctggacaacagagagactcctgtctcttaaaaaataaaaataaaaacgttaaaacatggtatttttttaaagcaagacaacctttggtgctggctcaggaagaggtacattaccccccaataatcagaggagaatcgtcagcatgattgatctgacctcgggcttcatgtgtcccatctcccacccggagctcttccaccacagagtctgatcctgtcctatgcctgggactaaatcttcaccctggtgttcaggccagaaaccgaaatcccagacccattcccagagggcgggaaggttccaccgggagagcttgatgtagcagaaagtgacttgggtgagacaggctgattcaaatacttaacctctctgagccttggtttctttatctatgaaatggggaggctgcccaccctctggagttgctatggcaattcagttagataatgtaagtaacacagcaggcagagtggcccccagagtcttcacttcgtaaatatcagatccctctaccttgcacatgtttggtatgagtgaggtgttaccaatccagaatccattgcttcttgggataaagattccataaaccttcatctccagtgatttgtattggtcctccttacttgtaaagcttagagtttaaaaatattaaaagaaaaaaaggggagaggctcccacagggacacagctagacaagatgagatgcagggaatctgatgttcttttttatgggaacagtcatatatgccatcccccattaccacctacccatgcccagactgcccccgctccattctgccaagacagatcaatgactataaaagctacaaaagggcctggagatctcatctagtttagttaccaaccaaccttttatgcacaagactttctaagctgggtgtggtggctcatgcctgtagtctcagccactcaaaaggctgaggtaggaggatggcttgagcccaagagttcgagtccagcctgggcaacatagagagacctcatctctaacacaattttttttttgaaacatgaaaaatgaagatttctgaccatgcttctctcattagttaacactttgggctgtgagggtctgatgcagagagacacagcctgggaggatcctaacatgtacacagcattcaaaaggctacaagacactttctgttgtgtccccttgaacaagcagtttgtaagattttgttggccaggcatggtggctcgctcctgtaatcccagcactttgggaggctgaggctgatggttcacctgaggtcaggagttcgagaccagcctgaccaatatggtgaaaccccgtctctactaaaaatacaaaaattagccgggcatgatggcgtgtgcctgtagtctcagctactccggaggctgagacaggagaattgcttgagcccaggaggcggagactgtggtgagctgagatcgtgtcactgcgttccagcctgggtaacagagcgagactcggtctaaaaaaaaaaaaaaaaaagaaatcaggttttgtctactaaacctgctgcacggttaccgttactagtactcacagggtttgttgcacatgcatcgttgctaatagtgctaactaatattaacagcccttgccctatgcctggccctgtcccagcccccctcccttgtataatttaacccttgcactgggggtagagattttcatatctactgatttcttacctttgctcatttatcatggagtgtcctttggttttctgtgtttgtatatacctttaccacttatagatttgaccagcactcaagaaccagtgttactcctgggagttaatacaatcccagccccatggcaaagaaactcatgtggttaggattctgtgtgcagcctggttagccacagggcacgtaaggctttttataatattgacatgagtgcagaagccccattcccgtgtaagccctgagggctcttgtttcataatctttttttggtcacatgcacacagctttattgagatataacccactcatttaaagcatacaaatcagtgggttttagtgtcctatattcacagagctgtgcagccatcatcacaaatgtggaagttttcatttccccaaaaagaaacccgtacccattggcagtcactcctcatcttcgcccccagcccttggccaccgtttatctacacatacttttgaaaggctagtgaaactttctcagaaaaataaatgcttgctcaaacatttgggctataatttcaggggcttcatgggtgcccccctgacatttatcaagaacaccaggttaaggaatttagctataatggaggcctctgtgtttcccagtctcctgggtatcagaggcccagagagggcaggtgccttaccctgggccacgcagtgaaccagtggcagcaccatactcacacatctcctttctgcggttccccagtgacagagttctcaggaagctttttcatttattttctgagaggagggtaggccatcttgtattgatctccaactatatgccagccacaattctaggtgcttatcataaaggttcatttaatcttcacaatagtcctgcagagtggacagagtccttcagagtgggcattataatcaccattttaaagatggagaagctgaaaaccagagaggttaagtaactcacccaagactgcacagcaaaaggctggggctttgaaactcagggccacagactccaaagactatgtcctccccactatgctagatttttttcctaacctgtgaataggagacaaaatagtccttttatttctcacagttgctttgcacactcagaatccatgatttcttctgcatgagggccattcagacctgtgcagaagagagtaatggaccaaggagtcttgggagcacctaggaggaggggatgggggagcatgaggaggagccagggaacagcagcagctgcagcaccagctcccaccccagcctctgccagtctcttggaggtggtgtgggtgcagacaccggctcacaaggtgccctgttagtgagcttggggtgccatgggagccttcttgttgtcaggcccaacccaagctggctgaagaacaccctgatggcctccatttgagcacaactaatgaaggactggatgccagagataagtccaggagggtgatgctgcagggcaggccagggaagagggtacttcatctctatcatggtcctctgcccatccatgccagcatctaacacctgttaaacactgggaggcaggtggtgaaggggccacttcccagcctctaagatacctcctaagccaggaggcattctgtgattaaattacagggcctcccacttactcctttatccttgaggcggtgctggaagcttaatgccaatctggtgtagggctctgggactacaggaccaaggcaagcagtcctttctctctctctctctctttttagctaaggaagccagcacatctgttctttgagaaaaagccctgtatttagaggtgtctgcctttgaaggcaacctgagaaactgtcatcttggcgctttggggactggccatttacacttctcataaatattcagaagtaggcagtcatttacataaagctaaatgcagaaggaattctcttttcagggaatacctggcagattcattaaaaaaattaaagaaaccaagagcataagaatgaaaagcgaattctcggaccccaggctggttttttctggcatgggtgcagtaactttgcctctttgctcagttatcacttttttccaatgacagtaaccataagccctgagagccagcaaatagaacaaaaggtgctgtcacaaacattgtgcaatctcatctctgagatttccatctggaaaatagactggagagagttaaggcttcaaccagccttgcagataaatgcagttagttaccagcccagcaaccctctgcttgcatgagagcccattatgctaacctccttttgaaattgctttgtttctcctccttccctgcactccactccccaagataatttggaaacctgggcaccaaggcttgtcccactctaggggactggggaaacagggattttgccagcacctcctggcagggcaaccatcaggtcaaagggacctgacccatgaccccttcctcagatcattgtgggtgtgattctcctctactacatactcggagtcagtgccttaattggagcagctgtcatcattctactggctcctgtccagtacttcgtggccaccaagctgtctcaggcccagcggagcacactggtgagtgcccaaaggtgtgtgtgttttgtccctcttcccctccttccctcgacagcagcaggtctcctcccacacacccacactgtcattgactttgactttgactttgagtaggccacttcacctgtccaggcctcagcttctttgtctgggaaatggagtcaatgggggaggaggctgcctcccggtgaggacaggaggcgggcatggcagtgacagtattgacactcaggccttcctctcgggtgggagacggagcagaagcctctcccctctgactcggggacccctgcaggagtattccaatgagcggctgaagcagaccaacgagatgctccgcggcatcaagctgctgaagctgtacgcctgggagaacatcttccgcacgcgggtggagacgacccgcaggaaggagatgaccagcctcagggcctttgccatctatacctccatctccagtgagttcaccccacacagccagccctgggtgctgctgcgtacatgcaaggagagggtgtcagagctcgggtaagagggggtgcagggacagaagcaggaggccttgagattatccgactcagtaggggagcctcaaactggctctgatagctaagctcccagaaatcaaagtactcttcattcatttatccaacaaacatgcatggaaagcctgctatgtgctggacactgtgctggccctcaggatacagtgatgaggaagagagatgaagtttcattcctcatggaactgatatgttattgacagacagcagcaagtaagtaaatgaccacagttttgaactctcctaagaatgaagactttttagtaagtcagactgagctgtcattgccctggggaagctacaagaaagcttccatccacttggggctatgcaaaagaaaaagactagttatccttaaatatcagaagcccaggctgaaggtactcacaggtgtagggactgaatttatattaaccaagtagtttgggaaccccaagccaaggaagaagaaaaagaccaaaactggtaaaagtcctagagtcccatatacttgaaaccattttactgagaatgtaaaacttttttttctttttttgagatggagtctcgctctgtcacccaggctggagtgcagtggcaaaatctcggctcactgcaacctccacatcccaggttcaagtgattctcctgcctcagcctcccatgtagctgggactacaggcacacaccaccacacccgactaatttttgtatttttagtagagacagagtttcaccatattggccaggctagtcttgaactcctgacctcgtgatccacccgcctcagcctcccaaagtgctggaattacatgcatgagccactgtgcccagcccaaaagattttttagaaattgaaattttagttatggaaattaattcagtgaacaatggtcccctggtcagagtgagggcttacggaggtcaggtgatccatggagtcctggcccaagtttatctcacagttggtctcgtggctccgtggacccatcccatggtggttacttcccaagtgcataattgggatgtagatatttagcaaccagctgacttcacactagttccctgacctgtccagtctaagagtcattatggccaagtggaagcccctggaaagaagaaaacaaaaaagaaaccaaaacttactcagtgcacaggttacatgaatgagtatagctgaagagagaatttttgaattagaagacagatgagtggggattacacagaacgtggcaaggagagtaagttggtagaaccattttacagatgggaaattaaggccagaggggagtgtgttcctgagatccctcctgaggttagtagcatggctcggactagatcctccaaagtctcttaactcctggtctcaggctattttccacaaagagctgggggcctctgtggggtgaagaagacttaggacaccatggggcaccattatgaggccatttcctcctaggagaaaaaaaatctctgggctctgaaaggagtagaattagggtaggaaattaagagaggctaccgaccacctcctccaactaaaattggttcttttggtgccaggaagagacacacctggtgggggagggaaggtggtaatggagggggtgctggtagtgtctcccagatagacccatccaacaagtctcatggagaatgagacggtcactcaggtcatctgcgtattcttggcattcttgctgcctagagagagagtctgatggagctaggtggccaccaagctgtcccactccccaagacagtttggaaacatgggcaccaaggcatgtccctgtctaggggactggggaaatatcccatagcagtgttctcacagtatggggctggccatgaataccccaggagtccaacctccctttgtccagctagaccatggtgtcctatgcctcaggcagggaatgtggtccagtcatcagtggctgggccgtctgccatacatggtgcaagccatggcgttttatgcagaaagtcctgctagcatttgattttctcagaatggagctgtgagcatggcaggcaaccactgtttcctggattcttcaccaagacaccccaagttcctggtctctccccgttatcctcatccctgaccctgtggttctcagagcctccaaacacactcaggctaagcactccatagacaggggaaatttggaaggaacatctagggagctcagaaaagccaatgtccctagccccaggcccacttcaaccttctctctgtcagtcctgcctgcccctggaggctggttacatgaagagtaaccccctgcttgtgtatagccccccagttttgtacaggtttagagacagttcccagcagtaggaacagctgccgaggtgggagagggcttctcccgatagccgggggacttcctctcccaggaacaacagggtggggtagagcaggcttgtcgttgctgagatagagagagggaagggaaacaacaaggaaagtgggggcactgggtccccaaggttcctggcacagcaagcagtgaagttggggcagcctcaggtcatgtagtgggggcaggtgacatctgctttgactgctcctaagagatatgtactcatctcctggattccaaactgcagcctgggacatgttttcttatataaacagcatcaaaagatgtgtgagttcccaggctagcccactgaaccctacctagtgggtgctcattgtcccccagagcccccagaagacaagccgtggctttgtgatgggcctggggccaggaggacctagggatatgttgtgaagagctgagaagactctggaaaaaaggggctctggagccaagcaggagcccgcccaggactcctcacgtgtccaagtcacctagggagagaaacagagcagcccaggttggtccctggaagagagcagcggaggaggggaaaggggagagcccctggggagagctttgaaagtcaagtgctgtttgctcagtgtgtttgcctttccgaggatgtgtttttttttccctccgttagtcagcagtgggagggggagagagacgggtggtagggtgcagggtacctcctggctgcaggcatatgctttgagtgcgtgttcatttacctcctctggacttcctgccttctgttaccagggatcaagacacaggtcattaggcgtgaggtaatggggcatctcttgttctgacccctggcgccagtcttggagtcctgacgctgcagaggagccccagagtcacatttcctgttggggcccatcctgctcatatgcggcaccatcagacttctgggcaggcaagattacctgtgactctgtctgatggtctcgccatcaatatcactgagagtagctgtgtatggagtcccgaactggtacaggataaaacagggggctgaaaagggaatgaatgggcacagtttctctggcatcaaaagtcacatccagaattgatatttcctgttgagtaaaaatagaaatataagttgctcagtggatgttgagtgagccctattcatgtgccccactctgtgccaagcaccaggaaggagggaagggaaaaatgataagatgttctccccgttctccaggagtttatgctccactaagaagtcagagctaacatgcacagaacagtgtggcagcgagagcagaaccgtgtggccagctccatgcttgccgcctagcaagcgtgattgcacttcatcctcataacaacttggtgaggtgtgttgctctgttgtcccattttacagcagagaggactgactctcagtgaattgaaatgtctcagtgaggtcttccacagcaaaaggcgaagcacagagaaggaagtccatgtgggctgggagttcacccagagattcatgtaggggcaatgtgggctgtaccttgcaagatggtgggatttcaatgaggagaagacaaagtgggaggaagctggagacaaggactgtggtctcttcctttagaagtcagttcaatctttttttccttgtggaagcagcataactctaggtggttcctctgtatctgaggacaagctttgtagaggtgacaaaggggtcctaggtcctatcaggcaagcactcgatatgctgccagttcattctgtccattgtgagatacccattccagagcgcttcctctgtgccaggctctacggaggttctggatgttaaagaggaagcaggcatggccctggccctcccagtcttgtgggagattgatcatgcccatgaatagtgaccatgtggtcagagccacagggtcaattccaaatgcccctgtttctcttttgtgttactcacctgactctgggtctttcgtttcttccattcattttttttaaacaaatatttcctgcccaccttctgtgtgccaggcctggggatgcagtgggagaagcctctgtcctcctcagtggaggcgctaactcagaacaggcagtggagaaaaacaacatgacctggagacctggtgccccttccttccccagcatctttgaaattcttttggttgttgttgttttgagatggagtctcactctgttgtcaggctggagtgcagtggcgcgatctcaactcactgcaacctctgcctcccaggttcaagtaattctccctgcctcagcctcccaagtagctgggattacaggtgctctctaccatgcccagtaatattttttgtatttttagtagagacagggtttcgccatgttggccagcctggtctcaaactcctgacctcaggtgatccacctgccttggcctcccaaaatgctgggattacaagcatgagccactgtgcctggcctgaaattcttcaatatctacctgcccttctgccagttggtgcagccacagtgggctgcttatgcatatcctggcctggcttggtggggagcatggctgagggagagccggggcacccatcaattaaggaggtaaagatcagtctgactgagatgcctcctgccacacttcctcagctgccagcaactgacaccattaacctgatttccttccccctctgttgactgcactgactattggactgaatgggaaacagccccgtgcacctcaaaatgcacttcccctcctgcagatgcatcttgcaattaggcccaaactgtgagcctgcatgctcctcccctggccctgcacaggcaacaaagctgaagttaatcagaggtacaaatggctggctatgcctctctgacacgtaacttctggaacatgtatcaatgctttggaaatgaaaagctcctggtattgcaatgccaggctggtgcccataagggccagaaaacattccttgggcaaagccagggggagtgggtgatctgatcccagctcaggtttgttgatttgttgttttgtttgtttcgttttgtatggggcaagggttgagggtatgaaaaacttacactatcatttactaccgtagtccccagaacccagcacaccagcacaaggcctggaacagggataccttttttgaatgaataagtctttttttttttttttttttttttttttgagacagagtttcactcttgttgcccaggctggagtgcagtggcgcgatctcggctcactgcaacctccgcctcctgggttcaagcgattctcctgcctcagcctctcgagtagctaggattacaggtatgcgccaccacgcctggctaatattttggtatttttagtagagatggggtttcaccatgttggccaggctggtctcaaactcctgacctcaggtgatccacccaccttggcctcccagagtgctgggattacaggcgtgagccactgtgcccagccttgaatggataagtcttaagggatatttttggaaaggatattctaaaaaatacccatgtctctacactattgcagaagggctttcagttttgatggcagcctttcaggccagcctacacgcaactaaacttttccataacagcatcacacttacacaagaagaaggttttataatccacttgccattatttaacatagttcttcctccttaactttcaagatctgagcactataatgttcttctttttgtttttgtttttttctaaatcaaattaaggtgagtcacctcaccttgggcctgagttggacagaaatctattcttggctatattccccacccctccaccaccttggaaccttatagaactttatgtggttcaggaaaatgagggcgaggcctcagatcttcaacccatgacagctgtatgcccagctccctgccttcctgtcttacccccagctagggcacaggactgactattgtgcccagagaggtgccagagcctgtaacaaccccagacttcccaggtccagccacatccaccccagagccccaaaagatgatcttcagagagacctttaaaacacaagtagctggtcacttccatccagaccagaacccaagatggctgtgctcttgctgagacatgttggttgtcattgcctccgagcccactttagccctcagctctgtaccagaaatgctgttcctttgggaatcacagccaaagaagagatggagcagttctggaataagaacacaagttcaaactgtcccatatctccccacatcactatctacagttggtctcttcccatggcgatgtccatctgccaccgtggcactggtattgctttgagtgcaggggtctctctttttggcatgttggccctgttactccctgggaactttgagtcttatttggaatgcgtgaagtccctgtgtccggggccagcactgatccacacagctaagtttgcactcatcttccctctcatgtatcatatctggaatggggtctgacacttgatgtgggacctaggaaaaggcctgaagattccccagctataccaatctggagtggttgtcccggttcttactgtactgtcctctgtagggctggcagccatgtgaagaacagaggttcccagcatcatcttcctacacattattacattcacccatctttctgtttctcacttttatctccagcctgggaaaagttctccttatttgtttaaatccttttgtgcttttagatccccttggagcagtagagtaccttgtagaccataagagtggaaaagggtctagttttctccttgtttctaaagatggggtggctgaaaaaactccccttttttgcctacagcttgcctctctgggcctagaagtggttattctgtctccatattggcctttgatttgtgctgagggtcagcttttggctccttcttcctgagacagtggaaacaatgccagctgtgtggcttctgccctgggggctgggggtgaggctttgggtgccactgcctgtgggttgctggcttaaaggacaattctgttcattggtgagagcccaggccattaacacctacgcagtgttattgaaagaagagaggcgggggtggaggggaattagtctatcccagctagagggagataaagagggctagttagttcttggagcagctgctttgaggagaaaatgtatagcttttgacacaacaggaagatccagaaaattatcattgaacatattaaaggttatttctttttcttgcaaaacacacacacacacacacacacacacacacacacgcgaacacacgcagctgatgattctactctcccagccccagccctgaaggggacccagaactccctgcacaaaggctgtccttcaaggggagggtgaaagaagtggaaaatcacattttcattctttagcgtctccatacaacagccagaactgggcagaagctaattatatcagaagcatactccatgttgctgcatcagctttgggatgttcatttttaaatttatttatagcttgtctcattcctcaaaggagttcagggagctacaaaaataaagacaataaaattgaaaaaaattaaattaaaaaaaccatgaccagggaaaatgtgcagtagaatgaagtgtcaattatcacgttttctgactgcaaaatctcccccacggctgatgcaccatcatttactacaacagcccctcttgttggacatttccagtttatttcgtttgggatggtttgttgctgttgctgtggttgtggttttgttttattgaattttgtgttagctgcagctaataccatcttgctgatggctttgcgctgctcttgaatgattactcaggataaatttcctggagacggattataggatcagaaggtctgaacttctgtgtggctctagctacaaagcaccagattgctttccaagagcgttgtagcaatttataatccaacactcagcctattttttggctgggagtcaagccccagaatgtgaaggaggggtcttggcctggagcaggggctgagggatgggtgcacaggacccctccttattggttatttatggggatgggccaggaggagcagaatagaggcccctgccctcccagttgctccttggagtgactgaccccataggggaggggcgaggctacctcacatttagaactatgtagttggtgatggtcaaggtcctaggtctgatgggcatcctcctccctctcctcctcagccagtaatggctgcactatgtcgtatgtcctagatctgggtcccttttgctgtgggaacaccaataatacttacgctgtttcctgccggaaacggtgcaggagggctgtggcatggtagtgggccctggaaaccatctagccttcatgaggaagggcagttaaagcacaggcatgtatgatgttggtattgattaaaagcctcacgggcagagaaattcgccatctgccagggccccagccatacgagggctccagccatacatcctccaggagactgggacctctccaattgcaggagccttgccttccccatcagattaggaattccccgaggatggggacaatgtccttcccacctgcttgagaactcctaaggggcatgtactctgtctccccattgtatctggaacttcctgggagcatagctcctgtctccgtcctcagactgggaatcccctaagggcagaggccatgtccttccacccacttgggattccctgaagttggggaccacatctctgatgtacaatgctttgtatgtactgactgctgcaggattcttggagtaaatgggcagtcaacttcttggactggtattgaccatctggacttcatcagagtgtccaagactttgccattcattagacaggggccatgtgcacaggcagagccctggcctctggcttctggctcctgactcctggtccctctgctttaatttggctaatggcagaaccagactcctttctgggctgccctggaaggggatccttgaatgaaagaggatagatgggaaggtggcagctgacatggttacctcttatgccatgggggggctgctctctctggaaatttaggcctggggtcagggcactgttgagcattttacaccctaggccagaggaggggtgacctgtggagcagggctaagctagtagcccatgaggtatgatgtgtaggcagcacctggggctcacagagcctgttacccatgttatctcctctgaccttggaaagagctggggtgtatgaacaagtatttataagtttacaaaaatcatatgaggaaactgaggcacggggaaggtaaatgacatgccctaggttacacagcttataagtagcagggattctgcccttctgtcacaccaagtcccactgtcttttcttcctggagtccctgtgactgatctaaaggccacatgtttaacagaataaggaggaggcctctgttgcagcaaaccagctaccccacccgcacacagactctaagggacatcctgctttaagctgtccttagttactaatacctcagtgagaatgagtttgaaattttctcaagagccatgggagactaggaagtctctaagcttcatagagagcctggcttggggggacacaggagccaaaggcagaggaagaagtggcagctttgtgcccccagaaacacgtgctcctgacctcacagttggccacagccagccaactctcccatccttctcccaccactttcccgtggggctaacttcaccctgtccacacggagtgacttaacagtttaagccccagagtcgggggccggggtacctgggacaagagtcctgagggaaatggggtgaggaactggaagtgccacagggctagagttctgcccctagcctactggagctgtgccccacaggctggccccactggactgcgctgcctccaagccatcctgggcatctccatgtgtagctgtcacgctcctcccactaaacgcctccctgtgcttcctctgcagttttcatgaacacggccatccccattgcagctgtcctcatagtaagtggatcctttctccatctcttgggggtagggtggagggggagggcgtctgcagtgacaggctgcccagatttggcctttctgcacaggggcctcagaagacaggctccacagccagactgaaaataggatcgaaagtttatagagggtgtggcccctccccaactccagccgaacaggggcctctgcctccaggcctggaagaccggaggcttagtatttagagaaattaaactttcttttaaaaaatagctatccaaatttttaatttttaaagtgaaacatgtgtattgtagaagtgatgggaaatccagaacagaaagctcaaagagaattaaaatcacccataatcccactggtaacatttttaatgtgtttctttccagtctttttttaaggcctatgatatgtcattttctacaaaaataggaatgtgctatgcatgcagttttgcaacctgctcttttaaatttaggaatatgccacacacaattctccatgccactgaatattatgatggtggctttctaaagcaattttgataaaagctgtgtgtgagctgagccatgggggtcaagcagcatgctcctacagaaaggcctgggcccctacgagcctgcagccccctcacccagcctcccatccccatcttctgtgatggctgcagttccttaaaaagatctgcttatttcccccggggccagtgtccctgagctgtgtagagttcacagcctgtcggatacacttgggaattcacttccaatgtgatgtattgagctggttcctggcctggctcctgggggaactgtgggtaacagaggccactgagccagccaggtggctggggcaaagcactgtgcagtttcgtaatcactctgtttacgttatcccgatgaggactggggagatgagcaccccgcctgctgtctgcagagggggccgtgctgacctaacccgagatctcctccctgcttattcccagccaagactgggcaggacagggagtcttggccaggacagggagggagcagcccctgctctccagcttgaagtcctgaacttgttggggacgtttccatgagatgactgtggggatgatgaaggtgtctccaactaaaagatcctcttaggagcctgctccctgacagccctctcatttcccttccagtgctgagcgtttccagtgtgggagggacccacaccctgggccaccctggcctcacttgtgcctctgtccacagactttcgtgggccacgtcagcttcttcaaagaggccgacttctcgccctccgtggcctttgcctccctctccctcttccatatcttggtcacaccgctgttcctgctgtccagtgtggtccgatctaccgtcaaagctctagtgaggtgaggggagggtccgggcgagggcactgggcaggcaggtcctgtgtcagcctcaaggcttgctcgagtgatggccaaaccacagctgtttggtcccggaacacacccccattgctgggccttgctgtagctggtcctggttggtcagagggacattggcctgtatggtttcccagctcgccatccctgagcaaggacttgcttacatacctcccaggagaggggactcactgtcactttcacgacaacttaaaaaaaaaaaaaaaccagtgttgagccaaatgtggaatcctcctaaattctacccactggtcctaacttcaccctccagagccaccaagaatgaggccatcccgtccccacgtggctgccccatggatatcagaaggcatccactgtgtctatctttcccaggccaagtatcccctaccctttccacagcccctgagccctcacagcctcagccagtgaaacagcttcccccaagcgctgggtcctgctctgattggcccacagctcttggaggctcccacttccaggctctagagcctcatggggactctgccactgtcccagaggcattgccctcttgggaatgaaagcctgaaggtagaaggctgaggctttggctgggaaatgccctgtctggagtgagaagatgtccttgggcctctgaagtagctctgcctccttgaaagcaagagcctgtcatgcctctatggagggctggcttgtccttacccatggccagagaaccagtcagtaacaaatgtcctctgtgtcttcagccttgaggaaggtgacacccctgtctcatgggaccctggcaggtactgggaagctggaaggaaggagtagctgttggaatgaagtagctgatagagagggtagcttgcagggggagactctagcatgggttcaaagatggaatggggcataactcagcaaaattatgctctaaggagtatctgaccaggcagtagctggttaaacagggattagctcccatttccacagtcggctgtgctgactcagtttcttgaccagggtgttgtggggtctgaagatcacccctcctcccaccacccactctccagccctatgattctgtgtagaaaccacagatttaagaacgctgcacctgcctgaaaactgttgcactgatcccaaagcgttcatattttcaaacactctggatcccactgtttccaggaatggaacaccagagtagcagaggccttttcagtgaggcagctcaggctctggctgaaggtgggcgcaggacactacctgaagcttcaccccaagagatgagggccagctccactcttcccagtcaccgcctgtgggggagggaggctggacagggcatgaaggcagagcctggtggtctgcccctcccatctaggggtggcgcacagaaagggagactccaggccacagctcacttacaccccagaataaccttgccttgagggtgggatggcttgtctgccccaggcctgttggacatttagcaaaagagaagaaaggggaatacaaacaatcctgagcttcccagaaagctttcacacctccaggatgggagagaatgaactagaagagtgaagcttccagtgcttcctcaggtccacagggaaatctggacaggggagagggtaggaatagccgcctcccccgtgagtaatgacacctcctccagcaggctgttatggggatccgattacataatgctacaaaacagttaacacagtgtctggcatttagtgtatgctcacaaaatactagctattgattctttaccaatcctagtcctaactaaccttaaccctgaccaatccaacaccaaccatccttcagtctaataacccagactaactaacttcaacattaaccctaaaactaaccaatctcacctccaatccagaccccagcctattccagctgactggtcaaccctagcaaaccctggtaacaccaattacctgcccccatgcccactggtctgcccccttcagtgtgggctttgtgggactatacttcaggcctgagatcctgctcagagctctctatcaggctgcgccctctcccctcccctctgcccctggcaggggtgaggggtgtctctgtgcttcccgagcagcgtgcaaaagctaagcgagttcctgtccagtgcagagatccgtgaggagcagtgtgccccccatgagcccacacctcagggcccagccagcaagtaccaggcggtggtgagtgcccggcctccccttgctactcccagcatggtcctctaaggcccaaaacttgggcctgctgtgtcggacttctgccttttttcccaggaagaggggctcccttccctacacagctcccagcccagtgggtcctcacctccaaaccacccccagcccctcagggttgtgaaccgcaagcgtccagcccgggaggattgtcggggcctcaccggcccactgcagagcctggtccccagtgcagatggcgatgctgacaactgctgtgtccaggtgagtcctgctgccccatgcctggccacccagcaccaactcccagagggagctcagcacctggaaagccagaaagctgcatgcttagtcctctgcagaggtcaccctgcctgcctgtacggtccataggagtccagaaaccagggaccaccaagtggggggacccccagccttaggcaagggtcagcatgagaaggccagtctcccactcccctgctctggaagtgatccaggggctggaatcagtgtcttttggctttcatggaggaggggaagccagagactattcactgggaactggctgcctttctgttctctcctgggcggtgggacacgcctaatgaagatcatgggaggctacttcacgtggaccccagatggaatccccacactgtccaacatcaccattcgtatcccccgaggtatggcccagtccacccctccagcatgcccctccccatgtcccactgaataacatagagataaaaagacaaagctgcatttattgagcacctactctctgctcattcttggtgtatgccctgggtatattatagaaggggaaggctacattctagaggcttccgtgtgctgggtgggagtgaagcactaaggacagggtaaaattgccagccttaatgtcaaaccatccattgcagacagtataggtaatgcacaaaaagatcagaagtgggtagccaaggaacgcaagtggaagtgatggggtttctgagaatggacaaaggccctgaggccatgaggcaggaggattttctggcagaggcagccatgagcaaagtatggaggtgggttggaggtgggacccaggatggtgtttcttgggaccacaaggagcctgggctcatactaggagcatgggaaaggagaagcgagtgcttaggaagggtggcggggcaggaaatcagagagggggaaggacctggggagccagaggaggatgttgatttccagaaggaaaggattaaagagggagaggacttgctggggattctaggtaggaagaaagaaaacaggggccccagggttgggtgcatctgtctgtctgtctttctgggtaatggttgttcagactcccccggccccactcacatctgccaccctccctccctgcaggccagctgactatgatcgtggggcaggtgggctgcggcaagtcctcgctccttctagccgcactgggggagatgcagaaggtctcaggggctgtcttctggagcaggtaatacatgtatcctcagggcccagtggaggggaaatctccttttaaccatcctcctcagttgaggatgcacacacatttattggagggcccactctgtgttcagtgaggactcaataaatgctgctaatggatattctcatcatcatcactagtacgtattcacctcttactatgcgcaggttctttgctaagtcctttgcatgcattatttcatttaatttttatgataactaacaaggtccatactgttctcaattctcatttatagaggaaggttaaactatttgtcctaattcacacagctaataagtggcagagctggaattgaaactcagttctgtcagactctgaatcccatggttactcagatgcacggcagtaatttcccagtgtgggaaattgcaacaccaacattggtttccagcttggtcctgagctgcactgacctacacaccataagtgggtgttctgaagatccagatgtaaccaataaatgttggtttctgggcaaagatcactgtcttaattaaagagccagaaccccaggctcagtcaatcacgaatctgttatttatacccacctacttccaagaagcacttgaaactagttgatgaaagattcatgtaaaaatcaaaaccacaatgagataccatctcacacccgttagaatggtgatcgttaaaaagtcaggaaacaacaaatgctggagaggatgtggagaaataggaacgcttttacactgttggtgggagtgtaaattagttcaaccattgtggaagacagtgcggtgattcctcaaggatctagaaccagaaataccatttgacccagcaattccattactgggtatatacccaaaggattataaatcattctactataaagacacatgcagacgtatgtttattgcagcactattcacaatagcaaagacttggaaacaacccaaatgcccatcaatgatagactggataaagaaaatgtggcacatatacaccatggaatactatgcagacataaaaaaggttgagttcgtgtcctttgcagggacatggatgaagctggaaactatcattctcagcaaactcacacaggaacagaaaagcaaataccacatgttctcactcataagtgggagttgaacaatgagaacacatggacacagggaggggaacatcacacactggggcctgtctgggggtggggggcaaggggagggatagcattaggagaaatacttaatgtagatgaagggttgatgggtgcagcaaaccaccatggcatgtgtatacctatgtaacaaacctgcacgttctgcacgtatatcccagaacttgaagtataataaaaaaagatgcatgtaaaataaaaccctttaaaaaggtaagaaaataggaactgagaaatgaagagggtaaaaagatgttcagcaacctgggcagaggacaactacagccatcaacataaaacctggctctgtgccctctggtagccaagggaaaaagggatctctgggctttggagtattcatttaggaataaaagttgcagccaatcagcagaagggcaagctttccctaccaatcatttctaggggaaaattattgaaggtgtcaggtttttcataagcatgagtacagaactgagcagggagaaagactttgggcccaatgtctgaatatcaacatgcacccccgtttcctgcatttccaagatgtccctgaatggtgtatccaaaagatggcaaatttccctcctcagtggggtcgtgggctagcagatgagccccttgggtttcccatcacctcccatcagggactgtgatgtctttgggggcagaggggtctttgcctccattcgccattttatttgggagatttttcaacatagcctgactgggaaggcccaggtattcggtttgagatcatattgccttattccgactgcctctccagcctttggagggaggagcccttttctgctgtccaactgcatgcctgcagcaagaagacaagagtccccagtgcactgtgagctgaagaaagtaaccaatatttattgggtacctcctatgggccatgccctttgctaagtgcattgtcaacatgatctcatcaagcctcctactaagtttaggaggggagtgttgttaccccatttcacagaagcagaaactcaggctcagagaagttgggtgacttactagtcagtgtgtggagcagagactctgcccatgttctttccctcaaacctggtcactgctggggcccccagggcctagtcctaagggttattgtccaagccccatgtagtggtcaggctggatctgggctctcctccaaggcagggcttttccagaaggattgcagggctcagacactggagctgcccctgccttgacctgctcagcatggatgtcaaaacccactctgaacctggtccctttgccctgctttcttctcctcccccaccctcatgccctcatgtggcatcgtgcctgcctcaggagctctccttgtcctatgtagatgaagcaggcatgattggcaggggtctgctctgccctgcctcagtccccacctcttctccaagctgtgccaaccctccgggtctgactgctgcccctctctcttaggaaacctctgccccagcccagggaacacaaggagcctctccaaggcagaggaccctaagcacttcttttttttattattttttattttattttaggttctgagatacatgtgcagagtgtgcaggtttgttacatagctatacatgtgccatggtgctttgctgcacctatcaacctgtcatctttttaagccccacatgtattaggtatttgtcctaatgctctccctcctcttgcctcccaccccccgacaggctcggtatgtgatgttcccctccctgtgtccacgtgttctcattgttcaactcccacttatagtgagcacatgtggtggttggttttctgttcctgcctaagcacttattataggccaggcactgtgcaggcacctcatcatctcagtcagtctgcaccgaactctgtgcagtagatattattatatcctcatttatcagattaggaaactgaggtgaagcaagttgtccaaggccacccagctgttaaatggcagaagtgggatttgcacctaggtgctcaagtgcattggtttgccaccatgtgctcaaagagaaggggcacaagagcctcatgaagaaggcatagctagcctgacagtccaaaggccagcagccgctgtggccatgactcacacacacctgcctcctcccagaactgccacgtgggtcctcacagctctgtccttatcaacacttactctcctttacaggtagcctaggccccagctcccagctctgttcgaggctcgcagaggggcggtagtgaaggggtctcatttctccaggatcctctttgctctctcgcccggtcctggtccagcttccctttcaagcatagtgaagtgcatttgttagcttgcagccaaccctgggaaatcatgagaatttgttcccaagtcaactcattctccagcgtccacagtgacgtattcactcacccagttgagcgcctagtgtatactagaccctgtgacagcaacaggagtgcaaaggtgactaagacgtggcccctgctttttttttttttttttttttttgagacggagtctcgccctgttgcccaggctggagtgcagtggtgcgatctcagctcctcacaagctctgcctcctaggttcaagcgattctcctgcttcagcctcccaagtagctgggactacaggtgtacaccaccatgccggctaattttttgtatttttagtagagacggggtttcactatgttggccagggtaatctcgaactcctgacctcatgatccgcccgcctcagcctcccaaagtgctgggattacaggcatgagccaccacccctggccggccccgcttttaagagaggggagagaagacctgggccttagaagagctcagaggaaccacaattgactctgcagtcaaggagaggaggctcactgcggatgtggtatttgagccttgaaggatgagtgtggtttcatcaagtagaaaaggcagggatgggaaagggaggtggtccaggcaggggtgatggtgtgggcaaagccttgctgatattaaagaacatagttctgtgcacctggaacactggatgcatggggtgcattatgaaagatgggactgaagaagtgaacttggcttagatcccatgtagtaggtctgagaagtaagatttaacccaaaggttgcaaaagaaccatgcttgtgataaaggatgatggattggggaaacagagaaaaagacagacagactgtaggaagggaggtattagcaaataatcataacacagtgtgaggtgtgcattaatattcactcattccaagtattgatcaagaagagaggtaggtactgggttaggaaacagcttgggcaaatgcatggggaaatgagagatgtcaagatgcattctaatggcagcctcttgaagatcttaagttgtttttggttcactcatttcgcaaatgaattcatttagcaaaagcactatggatacagtgcttacctctaggaagtaagttttagcccaaatgctgcagaaggatcatgcttatgacaaaggatgatggactggggagagagaaaaagaaaagacagacagactccaggaaggaaggtcagtctgcagctccttatagtggctaggagaaggagtctaggcagatacgactcaattagcttcatctgctgtttgtctctcaaaatctagacatgtgcactgctctggctggcccacctatcctgggcattgagttaagtgtgggggctgtgtgttgagagtccccctccattactggcaggaactccacacctcagacattgagccccaggtctgcagggagaagacgtgcttgcaaagtgagctaaaagcaaaacagcctctgacctggcaagcattcccaagtctgcacgcctgcagccagaggagagggtgatgccaggctgctgctcagatgcttttcagccatacccaggccaagacctggtgaccaggcagccagaaggagttccaggaggcacaaggcaggaagttgggggattaggaggtgtagaatggagaatgctctggggagatgggtgctttgttggtgcaactattcgtttattcctccagtgaccacgtgagcagtatggctgcacacacaggctctgcagccaagctgcctgggttcacatttggtctctgtgctttggaaaatttcataagctttctctaccagtttcccttattacccatgagattgatgtgaggattaacctagcatgtagtaaatatcctataaatattattattcaatagtgtacttctttgccaggaacaaaattcacctgttcctctttaaatgtcctccagtctgtctcctgggaaagattcttgtgagctccctggggacagggaccatattttgtttgtctcactgtatccgtagtgctttttgctaaacgaattcacttgctaaatgaatgaaccaggaacaacttaagaccttcaagaggctgccattataatgcatcttgacatctctctcctttccacatgcctttgtccgagctgtttcctaacccagtatttcactacccctcttctccatcaatatttggaatgagcaaataccgttagtgcatacctcacatggtattataattatttgctaatgcgtctgtctcctccatgactctgagctccttgagggattattccatgttgtaccccaggtgccccatgcagatgtgtattttgtgcactgttctgtgtaggctacaaaggaaaaggcctagcacctgcccttggggagctcacccacccaggatggacagaggtgtgcagacagagctgcagggtgggcacaaagggtccatctgctgaagtcctgcagatgcagccccgagcttgtccctcacgtcagcagcctggctcctggtctcagagagaactgtgtggttcccaagcattcactttaggaagaatcacttgcccctccctggctctctgcttcaaggaactgtgacaaccttgggatttgcaaactctctctttaatccttaagaggaaaatgttttggtaaaaagtcaagattagcagatacactcgggtgaaattctttccctggaaataaagaatagagccattaatatccacagtagagtgactttaaatgcccccggggggtcagcaggaaccagggccctgaggaaaggatcagcgtggggaagaggctcccacttccctgtgaggagctgcacatgcagtctcactggagctccctgctgcaatgctgttgcctgtggtggttggtgtggatgctgcctgccaagagccctgattccccaggaagagagaaaaaggcttctctcaggacggccctggtcgcatctgcctgtacaattcctggagcctttggggagctgaagtcaggggctcaagtgcccctgggtttcctggaggaggcaggtgtggtgagacagctgacagacaggagaagggatgctctgaggaagtgactgtccagccatgggaaccagatggcccctggctgtagtcctgatgctgccacttgctagctctgtgaccttgagcaggttacttcacctctctgagacagactcactgtctggacaatgagtaaaaccctacctttcctgtctcagagatttggcaatgggacccaatgacatcaattggaaaggatgctgtgggtgaaaggtaacctttcaggacagcgacaagcctgtctgggcaggatgaatgggctgtggagccctgtatatcctagctcactctttgaacctcagtttccacttcttccctttttatttattgccggggtcttaaatgagtgttgggggtatctgattctccctctgcctgtacttttggggccaagcactgagctgaaaagacaattcctcctagttctccaagcctacaacctgccccctaaccagctgtgagctgtaatacattctccagtgtcactgtgaggtttgtgccttcacccccattttatagatcaggaaacagaggctcctccaagtaaaggagcttgcctcagatttcacagccaatgagtggaaaagcctctgggattcaaatgtcagagcccatatttttcctacttctcgcacctgttatcatatgctgcctcttcctttaacctgcagttccctcccttcacctccaccgtctcaatccttcccactctttaaggttcagttcagctatgacttcttctatgaggctctactcattttctcagatttcttcctcctccaaatttcttgtaaaaattatgttttttctctgattctaaaagaatgcacattacattagaaaagatacacaagcatacagaagataaaaaccacctaatatcccatcacccagaagcttccagtttttctttatgcatttgcatatgcatttgtgtttacttttccccaaaagttctccgatactttgtcctacttttcttttgacccttataacttcctgacttcggtacctttctgatttgccctaccagagtgtgagcccctggaaggcagcctctgcaccctgattcaggttgccacacatatgccagctcctagtgggctggagggaaggacatgcggttggggaactggaagactcatgctttcagctgtgtgcttcctccctagagtgcaggcagaggaggaatcgaatcccctcagcactcttgtaaagaccacagcaatgagtgagagatggtgcctgccagacataccattctttacttttcagcttaaaacagatacaaagtttggggaggctcactggaggaggcttggggctacactggaaagagaagaacttggattcacaccccagcttcccctcttcccagctctgtcacatttgcaaactctgagtctcagtatcctcatgtgtaaaatggggatagggtttatagggttgtaaggatgagatgatgagttgtttgcaaacaacttctcacagtgcacagtgaaggtcagcaatgagagccagccccgccctttcttctttccaaatgattaatatatctgttaccagcctccattcattatatagctctgtcatgtgctaagcaccatgggggctgaaaaagatgttcttcctgccttaaaattccactggggatgaacaaattacacgggagctgatcagagaggaaggcagtccattatgagggctaattgagcagtgcagaccatgttgcaaactgagttagggcctggagagcttactgtgtgctggggtcctcaggaatgccacagatgcatcaataaccacctctgctactctggaagtagtcacatcaggaagactccagagataagcttatctgggctgtggccacagagctggaatttgtaagctttaggtttctatgtctcatgttaccagcttgtctataaattgtaaattacagccatctgatggttagggaatatgaagtttggttaagagaatgaaatgagaccacgaagattagagaacaggaaaagaggggactggggactacatacccatcagaatcttcattcagtcctgaccctcagcaggagggggatttcatcaggctcatttccatccttgatttcgtccatcctggttctcctgacaaggggcatttatcagagttatggcatgggaaatcacaggggagtaatgtaccatggcatttaagagtatgaacgttggagtcggagctattttctccgctacttactagctgtgtgactttgggcaagttacttagcctttctctgagcctcactttctttatctgtaaagtgagggcgatcagaataaacctccttcatatggttattttgagctttataaagagacaatactggctgagcacggtggctcactgccagtaatcccagcactttaggaggccaaagctggaggatcgcttgagcccaggagttggagaccagcctgggcaacatagggaatgagactcctgtctctacaaaaaatatacaaaaattagtcaggcatggtggtacgtgcctgtaatcccatctactcaggaggctaaggcaggaggatcgcttgagcccaggaggtggaggttgcagtgagccaagatcacgccattgtactccagcctgggcaacaggagtgaaaccctgtctgagagagagagagagagagaaaatactactatggtgcttataaaagttcaataaattttagctgttgttagtattattaaagtaagatctgtatgaaaataaagcagattttttcccccaaatgttcatgtcagaagtatatatttcattggcaaggggctgcttctggaaggttgagaggtatcctgggggaggggatagagcactggcaaaattggcatcacaattcaagtcacctcactcagtgttttttaagttatcaaaatccacagtatgaaaagcatttgacattacagtccactatatttatgcatttataaacaagagaaaaaatcacgaaaaatacagtaccacgtgcagtacacactgattccatctattctttttttttctttttcctcaaatgcacttgccgcctacttattccagacccaatgattgggtccctatccacagtttggaaaacactataagaaatgattgtgtcctctcactttccctctctgggatttagttttccaactataaaatgctcctgatgcccagccagcctcaccgctgctccgagtcaatgccaggaacgctgatttagcacatgctatttggagggtacccatccaggtgctgtgggagggacagagattgagaagagtgctttctgaccccacagaggccatttggaaaccctgggaatgggtgggagggttggaggtggggattgcttctcccctaagactcagcgtgatggaaaggcaatggggtgggaactaactggtgttggtctgtcccatttgtgtcccagcagccttcctgacagcgagataggagaggaccccaggtacagccttgggactgggtcagaagtgggtctcaacaaagggaaggggtagggtgggggtggaggacttgtgggtgggtaatgctgagtatggattcagggatgtgcagcctacatattttcagagacatggggctaaggcctgcattctcaatgagggcaaaatttggttcttggggacagaaaacacttagacattgcaatgctttgtggctgtccaaagtaccaaacagatgccagtatatctgtggtgctgaaatttcatggtgaatggagtcagaaaatagactagcgattgccagggtctggtgggagagagagggaagggactgccaatgtgtatgggatttgttttggggaagataaaaatgttttggaattagatagtggagatagttgcacaacctggtgaacgtacttttagtttcagaggttttctaaacctctgatttttttttaagtgacaggaaagacagaaaaaagtatatctaaaaaggctctaggggtgatcatggaaaagaaagttaagaaatatgactgtaaggaaaggagatgggtgtccctcaggccaggcagaaaattcagtcttgttgctttatgttcatgtgcaaatctaaaaaatccaagtgatatagattaatgaggctctgagtccctcaaaaccttccctccccttacctctccaaaaaacacttgagataccctagaggtggtatgaagtcaggatgggaaggttggctcagctttgcaaataagtttaagcctctggcctttgctctccaacaccaaagaggcttcactttggtatattttctctgccctttctccctccttgtccccaactgtcagtatgtgatgacaggctcagcctctgtaatggtagtgatcatatttcttgagccaaaaatcagacctcatggcatgtgacaagtttgcatatgtggatgagaacagagtggcagaatatttgacacgggagcagcttgggcagtccagggcacatggcactgcacctgacatccctggcagatcccccacattccgtggttgtcttctgatggggccatatggggctgcagatcatgcctggagccctcgcagctccagggctgcgggttcccagccccagagtgcaggtgctggtgtcagcctgcctggcctggcctggctctgtccagagcactccttgccccagctgtttgtgcagctgtatcagcctcagacctcagcctattcattccaacctgaatgcagaggctgggtctggaggagccacattgcgggcttcatactcctgatctgacaagttttccccccagagcctgcaccaatggcacctctccccattctccctcttaactgggtcctccagggccctcctcacacacccacgtggtcaggcagcagaggcttccccaagatgggcacaccccactctccacacctctctatgcagcatttgtggctacagactgggtccaggggattgtaaaggcatgctcatgttgggttggagggagctcaggatcttcctggaggatatggttcactcccatgagagctcagtatgcctttcctcccctgctgcagcccagagcgggagacagcgaccgacttggatatcaggtactgcgtcctgggaacattgccccccagggtcaactccctccagggtgctctcaggcccaagggagccacatcaccctgctgggcagcccccagaccccagccccagtgttgggggaggccagggagggcccctgtgctccaccaggtggctcgggagctgctgctgtttctgtgcatccatttactcccttcacataagatcatttttatctgggatctctttttcttttttcttcaaaaaccacatcactcaaaatgtggcttccttggctctgcttttaaaaaaaaaaaaaaaagttcttccatttggagaattacctgctgacttcaaagtccagtggcttgagggctacccaaagagggaggaagccagaagttgagtgttcccttggtttggtcacacttttgggctcctccctgactaaggaacaacagactgcagggctggggcaggctgggtgtagggcagggaggggatgaggtcctgctgccccagtcagttgagacccagacctctcaaacctgcctgggggaaggcaaggccaccagaggccacactaagcagatttctaccaactgcacctccccatccccttgcctccatctgagccatcagcttgacaactgcctctgagaacaagcccctgagaatgccttccgcaccccctactcccgccctgctttttccaggaagagaggccccgtggcctatgcttcgcagaaaccatggctgctaaatgccactgtggaggagaacatcatctttgagagtcccttcaacaaacaacggtaaaagcctgtcggagggaggcaggatgtggaggggaggaactgtctctggccagcctgccccagttccgggcccctccatcgatcacccacacccagccatctcactccccaggtgcttacctgcactccagcctctccatatggtgcacctggagaggggccaggtgtgcctgagcattggggcaatccagctcccataggggagagggcaggaatggagggaagggagagagccccgctgccttttctctagctggtgggagggctagctagctctctctgtgagtctccattcgcctggctcctgcactattttccctccaatgataatagttagggctagcatcgactgcgctcttactacataccaggcacagtgccgagctctttgtacacggaatttcctctcatgcttacaacaacctcagtaggtagatattattgttattcccactctacagatgaagaaccaagtttcagaaaggtcccaaggccacccagccagtaagtgaccaagatgggtctcaaatccaaagctgcctaacacctaagtacatgtttgtcaccaacatactctgatgcctccatgaactctggctggcacctgcccaggctaagggctggctggggaagtatgagaggaacaggctgggcaaatatttgaccagccatcatcattactgcctaaaccaaccagcagtggttttccctgcagtgccccaagcacgggttccggctgcagcttttcccactgcacagagatcatgagcgccctttcatcacttactctgcatatttgttcccaaccaattccatccttctagtatttaacctgcccaaacgctgtgtgaagtgctgacctcagctcttttcaagctcacacggtgtttgcttgcacccaagcgggaggcctattaaagccattgctcaccctgggcatagctacccagagactaatgaccctctgcaagtgctcgggccaactctgaccaggctgaccagctgcatcccctgcctctacccacgccaggtacaagatggtcattgaagcctgctctctgcagccagacatcgacatcctgccccatggagaccagacccagattggggaacgggttagtagcagcctctgaggggttttttcaaagccaggacccccaacctaccatgccctgagacactactcaggacaatgggtaactaggaaataggagacattgaaggctgaagagttgcctgcagtaaggtcaaacatgttgttcttgatgatgtcctttgacaggttttcagtcctgcttggagggcaaggtcagcttagtgccctcccaggctggggatcttcttcatttgcaccccaggtatacactgagagcccacacagcactgtgctcagcctggggttgtattgttcctgttcatcctccagatggggtcccctccacaagcttagacgaacaggattctcctgtgactgtcctccttttgtgtgattttaatccctgctgcctctgtctttgtttgtactggtcagatggtccctagcgcctacacaatgaatctttaaagacttggggctcatgctgccctcttctgaatgaattcagtaaacacgtgcaagttccttctctatgcaaggtgagaagcaggcaaagaagtggatagagccaggcctccatcccaaagagctcatagtccagtagggtacaggacagtgtctcctgaatggctgagggcatgatgtgttcctcctctttggtgacagggcatcaacctgtctggtggtcaacgccagcgaatcagtgtggcccgagccctctaccagcacgccaacgttgtcttcttggtgagtgcaagttcccttggggtcctggtctctggctgcctcccaggcctaactgcccacctccacctccccgcaaccccaccatcatccaacaatctccctctccaggagtaaatccctcctgccagagatattgccttatcatcctagtgatagggaaactgaggcaggcaaggatagcacaaatgacccattgcagacttcagatggagctctgcagtagccaatgaggagaggcaagctgtagttataggctgcctgtctgtgggacagcccaacccctcaacacttatgcagcccgactataagaatggctgataacagaatgtgtgctgccacttcccatcttatgcccagtgcagacattgctaattgttcacagcattatttcccatggaacttaactcatcctcagaatccttctcaacacagcactccaggtaaccactagccatcaaacatgagataaaactaggccaggcgcggtggctcacgcctgttattccagcactttgggaggccgaggcaggcggatcacgaggtcgggagatcgagaccatcctggccaacacggtgaaaccccgtctctactaaaaatacaaaaaattagctgggtgcggtggcgggcgcctgtagtcccagctactccggaggctgaggcaggagaatggcgtgaacccgggaggcggagcttgcagcgagccgagatcgcaccactgcactccagcctggggacaaaccgagactttgtctcaaaaaaaaaaaaaaaaaaaagaacgtattcgcaatccttacactacttcatgtcaagttctgttgtgtcaggtgccttgactgacactgaagaattctaagaaccagtccttggcctcaaagatttagaatctgattagggagacagagctcacccagttcaagaggcccagcccggttcaaatccaaactgtgcggcataaactatgagggggccttgtccagggagacaactgtgagggctggagtaatcagggagggcttcctggaggagagcctcaaagggagagtcaattaaacagaaggaaagagggaggccatttgcacagtgagttggaagaaggaagctcaagtctctgattccagctttattccctcccctctccctacaccacacgcacaagcactcctttactaaagacacttcacagtgggaagattcagtctccgttaccgtctgacacacacacagcgttttacaaagcatgggtgcattcgcgatctctcatgagatttaaacaaccctgctagagaaaagtgaagtggacattttatttcagtaaacgtttatgaagcgtctactctgtgccaggcactaaacgtttatgaagcgtctactctgtgccaggcacaggcacaagaagtctcagttcttgggagtgccataatcaggaatggacaaacaatgatcagatctggctttgcgccagtgtcacgggaatagggaggaaggaagggtaggcgtgggggtcaggacaggatgcaggaggaactggtgcttaggtgagcgaaggatgggtgggagttcacaaggcagacaaaaggcagagcagcactccaggcagaggaacagctcaggagaaggcccagacggcaggcttcctgggaacctggaatgcagagtgctgggaaagcacagatgaagcatgagtctagaagggaaagcgagaggttataaagcacctggaacaccagcccacagggtttgactttagagatgatggggagccgttgaaggtccaggagtcaggcagtgaagtgattagatctgtttgagagtgatatctgacaactgccccattttaaatgaggtaaccaaggcccagagaggttgggtgagttgtccaaagccacacagctaactagcttcagtccctagagcagagttgatagaactctaatgggttttatactcattgtcacccctccccaccatgcctttccctaccctctactctcttcctctcccttctgcccaggatgaccccttctcagctctggatatccatctgagtgaccacttaatgcaggccggcatccttgagctgctccgggacgacaagaggacagtggtcttagtgacccacaagctacagtacctgccccatgcagactgggtgagggggaacaagggggtcaggctatagggggcagggctggggaggctgtcaggcatcttggcaggaaccaatccgttgtcttggtagcaactgctgagggccacaaagcataagagaccagcactggatggctttatgcatgctgggcatttcagggagaccctgtacaggccaggggtttggtatcacctagacccacagacactccccatcctggcccgggccccccatggtacactcaaggctggcaccaagaagtctcaggaataatcaagtgctcacttctcaccttctgattcctgcccttttgatgacccatccccgcagtcatggggagtgcccatttggatggaaaagccctcttcccaccctatgaccttcccggggtggatggatgcaccaccccgggaatcatatgggaaatatggaaccaaacaatagcagtagtaatagaaacttcaggctgggcgcaggggctcacacctgtaatcccagcactttgggaggccaggacaagaggatcacttgagcccagaagtttaaggctgctgtgaaccatgatcatgccactgcactccactacagcctgggcgacagagccttgtctctgaaaatttgaaaaaggaaagaaagaaagaaagaaacttcaatattatcagtagagtccaatgttgtgaaacccctcattaactaaatttccatactcttcagtaggtagaaaataattactttttgattcattagaaagcacttaatttttaagatggagatcatgtaattttgaactctaggtcttgcctactcctatataaattctcctctaaacaacagccaaaattgaggccctctttgagcttcaggctggtgccaaatggctctgcttattttccccaaaataaatcttccttccatgtatgatgagaccccctccagtataaagaagacccaaagaaaatcacccaaagaaaaaaggcccaaagataagacccaaagacctaaagatttaaatatatatacagatacagaaggtttgtttctgagtttctgtagtgaccttggcaataccttgtagttcaggacaatcctgaggaacacagaagtgctggcttccttgaggaatcagtgatcaggactctcgagccccttgaaccccagcatagggcgggagggggtgagggcagcaggggtgggtgtctgaattaatgtcaggtctacgtgatggtgtcatcaagtgttccagataaaaagttttattgagccgggcgcggtggctaatgcctgtaatcccagcaccttgggaggccaaggcgggtggattgcttgagcccaggagttcgagaccagcttggggcaacatggtgaaaccctatctctataaaaaaaaaaaaaaaaattagccaggtatggtggcgtgcacctgtggtcccagctactcaggaggctgaggcaggaggatggcttgagccaggaagcagagattgcagtgagctgagatggtgccattgcaccccagcctaggcaacagagtgagaccctgtctcaaaaaaaaaaaaaaaaaaagatttattgattccaaagaggcatggccacacacacttagaccagcaggtgctttgctaagccctgatggaggctgccagacccgccgtcaagaggagctaagggtagtgtacaatgagcccacttagtgtatgacggccgctgccgtgggtggagtccttgtgagtaaccagccagcttgagcaggatgcactaatttgctctgcaaacccagccattgagaaatacgcctcagatgtaccgaactctaggtcctaggagtatgttggttggggtaggttatcaataccagcccacttgcagtggatgagctggtggccatttgtagtgaggaaagggatgtgtcaacctccatcttagactccacaattgagggatgtgaccaccattcctccccagccagcccccaaaccacgtttgttgctgcctttccagatcattgccatgaaggatggcaccatccagagggagggtaccctcaaggacttccagaggtctgaatgccagctctttgagcactggaagaccctcatgaaccgacaggaccaagagctggagaaggtgggtatatccagggatggccaagcagccacccctggatgcaaaggttctgctagaacctgaactcataaaggtcttcctgtccttagtgccccaggaagccccctaaagggcagatgtgggagctgggcatgaactggctcctaccagaggagagacagtacctgtgccaggtgcccagggcagaatcaggtgggcaccttcgccttatcctgaggtagtcagatactatttagttgcaaagtttcagaaaatcaactcaaactggcaaagaaaactaagcaaagaaaacaagagggaattaaggatttattgacccatgaaaccaaaaagtccaggtgtgtcatagctttaagtgtgctggatccaggtagtcagtgtaatcagaaatctgtttctcccatctcttgactctgctcccctcaaattggctcagctcccctcaaattggctccattctcatggtatcagtgagggccaccagcagtcttaggtttacattctcccagctcaacaactctgccagaaaaaaagtgcctctttccccatagttcagcaaaagtcccagggctgagtctcactggtccagtttggtcatgtgcccacccctgaacaaatcactgtggccagcggtgtggaatgtgaggattggcctgtcctgggtcacgtgccactttgggagccagatccacctgaatcacagagactaaaaacaggggaagagtggttccccacagggatatgggggtgctattatctgatgaaggggaaggactaaatcctggcaagatgaatgtgtgtctgtctgcccctccctcaggcagggacaaagtagaaatctgacattggtcatcaccagagtagttaccccttaacttccccttcccccaccaaccatatatcctgaagacattgcccaggccacatctgtcttttaggagactgtcacagagagaaaagccacagagccaccccagggcctatctcgtgccatgtcctcgagggatggccttctgcaggatgaggaagaggaggaaggtacaggcaatgggactgggagtgaaattatggcctgaggtctgatcagccacagagaggctaaggtttggggttctgggtgtggtgcagtagtgtgcctttgattaaatggcttccctctgtgtgcccccgttgtcccctcagtaagtggggataaaatgccctgattcaccctcagagggatggaaatgtgtagccacagagtgggttcttgcggcctgcagaggaggcagctgagagcgaggaggatgacaacctgtcgtccatgctgcaccagcgtgctgagatcccatggcgagcctgcgccaagtacctgtcctccgccggcatcctgctcctgtcgttgctggtcttctcacagctgctcaagcacatggtcctggtggccatcgactactggctggccaagtggaccgacagcgccctgaccctgacccctgcagccaggaactgctccctcagccaggtgtgactggcggcccatggcagaggttgggagtggggatgggggaagggctgagcccatgggcaccctggaactccaaatcactctctgcctgtgaaggagtgcaccctcgaccagactgtctatgccatggtgttcacggtgctctgcagcctgggcattgtgctgtgcctcgtcacgtctgtcactgtggagtggacagggctgaaggtggccaagagactgcaccgcagcctgctaaaccggatcatcctagcccccatgaggtacccgtctcccctggccaggctgggactgtgagcaagtcactgttctctgagccttagtcttcccatctataaaatggggatatacaacctgtcacaagcttgtgggggtgactcaaggagacagtgtgtgtaaaagtgccctccttgtgcaagaagcagggagaaactggc

SEQ ID NO: 15321 - DNA, 32644 bp, Homo sapiens
actgtgcatctttgggatcgtggaccaccttgggaaggagaacgacgtcttccagcccaaggtaggcagccccaggggtagggtaaggcaccctctagatggttttcagttgtttctgagagtgcaacaggccaatgtgtgtgagccatggccacactggagtggctcctcacacatgcgcaaagcccatagcagtatccccaccacagaatactctacatctggtcaacagaaatgccagagggcgagcctatgccccaagggtatcctactctcctctcaccgtcactaccatagtacctctcccggtagttaggtcagtccgaaaactgcaggaagtgcttttgtttgtccagtgtctagagcttctgtgacttggatttgttggctttcagttcatgtcatcttagtaaactctttaaaagttttcaagatctgtcttcttcagtcctgtaaaggctggcacttgagctttctgcaggggcatcttgggagctactgtcagaggagagagaagtgggaaaccctcacgagtggagctttgtctctccccactccaaatttcattcaaagctgcccgtagttttattaatatgttggacttttccattaaaatttcttttttaagaaaagtttccatggcttaaaaaacactggagacttattagactagattatatccaatggccttggcagttgtaacgattctgcaaactgaaatttgttggagctagaaaacctttccccggggttatttgccctgcgtggggccgtagcatccacttcgggggctgggcagactgtgctctgttgtctgtttccttgcagccgtttaggtttaaatggccacaaaatgaaaactttttcacccctaataagtttcagagttttagtttccaagtgaggatgtcattataacattttaaccacagacagtctgaaaataatgcagagaatggggaattagggtttttaataatttatgacaccctttgcgtaacatttgttcatctcatgagctccaaaatcgcagccagcagttaatcctcaggaggtttatgttcatttttctggagacataattagtcagctgaacagttttggccacagatatgagatacgttgagtctgatttatgcagcaaactttcattgaacactgctgtgtgccaggcctgggttgggctgtgggaatatgaaagcaatagttatgatgaggatgattaacaatattaacagccacttactgaccacataatacatacctggctgtgtgcaggagttatccatgtgttatttaatccctaaaactatcctttggcgtgagtatattttgcaacatctttactgtggtatacctcaaatactgtacagtttatgagatgataggtattcttatccccattttacagatgagaaagttgaggctcagaaagtttaagtaattttccccagggtctctcagctagttaataacagaggcagaatttgaacacaagactcactccacagtctgggcatttacagccaggaagctaaattgactattattatcaagccatcacctctggctccaaggattatgaaatccaacagtgaggagagaaatcaaaataaaatacttttatgctatgtgttacatgtgactcttaggaggaatattcagggaattgtgggaaaagatagtgattaacttagccagtggtcatgaacagcttcatagaggaggggatgtttgaaaggggtcttgacggatgagtaggaatttgccaggctgccatgggaagatttcttgctcaaccaagaatgcaaggaccacttttgcttatttaaactttgatggcttttgaagccatatctggctttttgagcctctctactttacctggcccataaaagagaggggaagcggctgcttctcttgtctacaggagtgtcacctttggctctagcctgaccataggctaccccagaatacccccattggcgatcctgaagcagcatggagccagttgttaatatcagggggaaatggcacaggccagagcccttatcagagtgtccacaccacgctcttcttcctgtgtttcccaaaacccttgtgggattctgctaaggagagagctctgaggcaggacgtgccaaagagatggcgaaagcacttagaattttagttcatctgaacgttatcattgccgtttttttctctttgtttatacacaaaccctggggtttattaccgtctcattggaatgctcttgtcccagttacttagcacacaaatccctgagacagatggccctgcctcagtggcagtgggccttatcagatttaatattttttccctgcagcccaaacacaatcagaaaatttccgacacagaaacaagagttgaaagtaaatatagtctccagtgtccgcaacaaagaactctccatcatgtggttgcctgggatgtggcttaattctcatgtgggcttctgagctcagaaaatgggggaaagggatcatttactgagatcatttggttcatctcccagcccccaagccattctaatccagagagaaccgagtgctattctggtctttatgaatgacaaagaaggaagctccctagctacatgttgcagtgtttcacagtctgggagaggaagccgttttttctgcccagcctgaatccatcctgcagcagttggcacagcgaggcacctgtggtttattcatcatcactcttccttcctaagatactcagagttggcaagaaacatgtcatccttggtatccgcaaggacgaacatttctgatgtcctctttagttactgaaagtgtctgtgacttgccagatctttgatgctcctgtcaccccgctgccactccccagggaaagctgggacccaggttgggctctgcctatgatctatagctctttccagcctcctctccaacccaacccctactcccaatctgtcacctcccatggatgccactgatctggctgaaggacaagagaattagattcataatgagctgctggtgtctgaaacctgccagcactgccctgggctatcagttgagccaaaggaagaaggaacagtctgggtttgatcgaagggctaaagcttcaaacagcctctaagtctcagtaggaaaatgtgtaggtttgggagggtgtatgtgtttccgaatgagttcccctaagaactgcttatggttctatatgtgtgttctgtttgtccctgtgtcttttggtgtgtctttttctgcgtgtgtgtgtgcatgtgtgtgtgtctatgcccccgtttggattgccatatttgtggctatcattatgagtgacttaatgagtgtatatgcattggtgtttctgtgactttgtggttttgatgcatgggctggcctcttcataaccatgtccatgcagctggtctggcctagagtacctgccttcaattcactagctccttcttggccatcaagactctgctcaaatgtcacctgctccagggagccttcacctggttgaattagatgccccttatctgtgctcacataacatcctatcaaagcgccctgtttctttccctgacttgatcctctgtcccctattgcctgacctctgtgtgcccagcactcagcccactgcctgacacccaggagatgcacgggaaatggttctgcaaagaaggaataatgcagcaattactatatattgagtgcttacacttactgttttttcacatgcactgttacattgacttctcataacaactctctgaagtcccttcatagcctcaccttacagatgaggaaactgaagctaagagaggttgaggaacttacctaaggacacagtggctaatatatgatgagtcaggacctctaagtccaggctcttaaccaccgtgtcaaacagtcttgtatgaatgggtaggtgtgttggtctctgggtggccaaagataattttattctttacccagggcctcccggggctgggacctacggacaactcaccttttgacacctgccaaaataggaaacaagagtccaagtgatcccctctcctttaagcaccagagaacatgtgaaggggacctttccaatcatacctctggcctggcagagacaatggggctccaaactgtagagtcgggagtgctgggttttagtcctacctctgcagctaactcatttattctcctcagcagtcacattctgcaagcctcaaatgcaaaatgtgtaataacttctgtagaaagtacatgggggcatgaagatcattggcttgattgcttttaaaaaatcggtattgagcactactggggaaatccctggaaacaaacacaattcttccctgagagcttgtgaaaatgcaagactagggcctatgattttccaaagcattttcttccaccaagtgtcaggttgtaggtccttggtcttttctctcttgccttggtacctgcagggtgctgaccagtgctatcatatcccctccccgtttcctaggaccctcttctcggtagactccaacagggcctgccttccttgggcagcatggcaggcctcttggctagtctagtacccacttcttttttttttttttttttttttggatggagcctcactctgtctcccaggctggagtgcactggcgcaatcttagctcactgcaacctctgcctcctgggttcaagcaattctcctggcccagcctcccaagtagctgggattacaggcatgcatcaccatgtccagctatttttttgtatttttagtagaaacagggtttcagcatgttggccaggctggtctcaaactcccgacctcaggtgatctgcctacttcagcctcccaaaatgctggaattacaggcatgacccaccacgcctagtcaggtacccacttcttaactgaaacttagctattccaggttctatcccttttaaaccaactctttgaagagaggtctaataatgacccaatgacttatagctgcagtgagatttttattttaacaggtcacaaaattctcaatccacaaaagtagatttctgaccctaggttattttgttgggggcggagagaggaagtcaaaggttttgcagcctttagagctgcaaaaccagaatttgttgttttgttaaaaatgcacaaataccgacgagtatatttaagtaacacccatagtctaacgaacaaacatgatcagttggcttttccagccctcattctccagcctgtgtgttttctgctcattgtaacacagcgtgtgtgtggcattccatgtttctccagagctttcatgagaatcagtggtcttggatgcatagtgttcccatgagtaccttaattacctaaccattccctgtggttggaaatttatatgggtttttgcattctccttctgctctgaccccaaaataaatgtctgtgttcatacagctattaccttatgtgaaattattttctttgggataaattctcatgatgtgttgttgctttaaaatagtggactccagtctccagagctgcgtctctgcagaggacagtgggacagaagaatcccagggcatgttaaaaaggaccgggtcttcctaaacccacatgcctatatttctgacccagtaccagccaggggggcaagtttccatcccccacaagtcacaaacctgtaactgacactaggatgcttaaggtcaaaggcctggacgaggcctagacagtgggtctggggtagtgtttttgacatcactcaggttcatgttcacatgttgtccccttaccagcatgtgaccttgggccagccactaaccctactgaaactcctttttttcatgtatgaaatggggctaataatggtaccctcctcattagggtattgtgaggatagagttttgcacctgataaatattgtctcctgccccttcctcccctggaaattcaggtctctccctgcagcctaattttaaggcccatttttctgcttccagcccacccctgcccttctaccttcgacctcctccctctgcctctccctctggtgcactggcaaatgggacagagagcctcggtagggccttcctcttagagtcttgcacgcatccctcagtggtctccctgtggctgcttcctgctgccaccaacagatacagacccctgtcgcacagatcatggtagagacagtggtgagcaggaccagacagctccagggagcagtgagggctggcttagagaacctctgttaaactgagaggccaccatcaggaagctctgatccaagatccaggaatccctgactctagggaaaggcctccaatgagagcctgggccctctctgcctgattctgattgtggatgtgccctcaaactccttctcatcactttgttccatccctctttaccctgcagcagctcccacaccctgccaaacaggatgcacagtccagggcagtgtctgagaaagagcagagatctgtcttcatggaaatattgatgtggctctgctggggagcaatggatttatcaagatcaaagttttcctgggagttattgatgcttaatttggaaatagacacactgttgatccctggtatctttagcaacaaagttaaaatgtttgtttttcttcactggttgccatctgagatcttgccggaagtacacaagagaaccttaaatttaacaggaggccctgggagcccatgaggctggcgggcttgggtctgaaatcttttcagtctcttgtaagtgatgagctctcattctctcctgagagctctacggtgccatgttttccactggccttttctgctcagtaattgctacattacaggctgttggtaagttcggaacaagggagctgctgattccatttctgtagcagagaacatgcaccgtgagacttgttgtaccagttcaggttttaggtgctctatttattcttgccccattcagaatgctctcccctgggtctgtggccacaatgctaagagtcatatttatgggcctgcagttgtaattgggccccattctgttcccccaagtggaaagatgaacagggtgtaagcaaccttccctgtagttagaaaaacgtttagttggatttatcagtctgatttttcactcataaacaattgcacaagcctttgcaagcccagagggtcttgtaataatgatggccgtggtccattatggcacagtgatgtgttctacggtggtcattttgctggcaatgacagtcacctctgaacttctctttccaacagacacaatttctcggggtttactttgtctcatcccaagagttccttgccaatgcctacgtcttagctgtgcttctgttccttgccctcctactgcaaaggacatttctgcaagcatcctactatgtggccattgaaactggaattaacttgagaggagcaatacaggtacttggatgattattttttcactttgccataagaaccattattaggaataatgtccatgagtgttattcatcctcatggacactcaagaataattctgctgtaaatttattttttgttgcccattaacgatgttttaaaacagtaaccattgacaaggcagtgtgggatagtggaaaatatcttgggctgaacttgggagacagtgtagctctggctctggttctgccttggactgggtctgaaaatccagctgctcagcccttggcttgaaagtggtagacgtcactaattgatcacagcactctttctgaccaagggtaaatgcaaccttggaatcctctctaagtggctgttccagagttctgctaccagacagtcttctttgggtgtgaaaaaaggaatgtgcttgacatacaaggtctagatagcctctaagacagggtcccctctaagatggggtattggtccatggcctgttaggaactgagccacacatcaggaggtaagcagtgggagcaagcattactacctgagctctgcctcctgtcagatcagcggctacattagactctcataggagtgcgaaccctattgtgaactgtgcaggcaagggtctaggttgtgtgttccttatgagaatctaatgcctgatgatctgaagtggaacagtttcatcctgaaaccatccctctcccccaggtccatggaaaaattgtcttccacgaaaccagtccctggtgccaaaaaggttgaggaccactgctctaagttctatttgaacccttaagtcttgctcactaatgagagtgacctatttggtctgttgggtcacttaagtctaggctcttggtcctgccttctgtgatttccttcttagagtttctggaaagatgatcaaagccagggagtgttcagggcccctctgaagaaggtgatgatgagagttgtccaagtcccagggtcttcactaggattttggttcagctatcagactagagagacatcctgattgagagtagtttaaatgggatagaagtttgtttattcttcagatagagtcagggctgacacaggagctactcaatgatcagagacctggcttcttctgtcatgttgctctgccagccttcttttgtgacttttgtctccatagccatggtgggtattgaaactgccactatatttacatttaaactagccagaagaagggacaagaggagggaacgcattttccttttaaaatggtaatacctgatttgcacataccctctcgcatcccattggtgagaaagtggccaaatggccgtatctagagagtctagaaagagcttggtctttattcttgacagctatatatgcactgctagaaattctctgtgcaaagaggagaatgggcattgggaataactagatgcagctatgcctagtgatgtccatgaagttgtggtaaaatcctgaagctaccttgttctttggaaatgttcctcagaatcattaacattagtcatgtgggagacaggagaagaagctctgcagaaaagggaccgagaggacaaggatatagcttgggctggggacaatgtcagagtccaaactctggctatcttggaatagtctgtgtgaacggtgccctcccaagttgtgcagtgcacaacctgtgcagctatatatggcaaccctgcccatccccagtggtttctcactgggaaagcagagtatttcctcagggatgtcattatgtgacaatagtggaaaaagcccaggaaaatctaagaccttctaagactcatgggggcccagagctgggaggaaccaagctgttgctcagttcagaaaacttctctagaaatcccagcctctcctcacacccctccagtgacaggcagacttgcaccaccacaagcaacagccacttttgtggttgggcagttttgtaattaaatatactaatgtgtgtatgtcataaattacattttccaattatgccaaaagagccaaaaatggttttttaatggttagcatataatcgtttttatcaaattgcttgaatctttcatgttaataagagagattcattactatgccacaaaaagcaaatactggcattaattatagaaacaaattaggggggtggagcgcaatggctcatgactgtaatcccagcgctttgggaggctgaggcgggtggatcacaaggtcagaagtttgagaccagcctgaccaacatagtgaaaccccatctctactaaaaatacaaaaattagccaggcatgttggcgtgcacctgtagtcccagctactcaggaggctgaggcaggagaatcgcttgaacccagcaggtggaggttgcagtgagctgagatcgtgccactatactccagcttgggcgacagagtgagacttcatctcaaaaaaaaaaaaaaaaaaaaagtggctcatgcctgtaatcccagcactttgggaggccaaggcgggtggatcacaaggtcaggagatcgagaccatcctggctaacatggtgaaaccccgtctctactaaaaatacaaaaaaaaattagccaggcatggtggcgggtgcctgtagtcccagctactcgggaggctgaggcaggagaatggcgtgaacccaggaggaggagcttgcagtgagccgagatggcaccaccgcactccagcctgggcgacacagcaagactctgaaaaaaaaaaaaaggaaagaaagaaggaaaggaaaggaaagaaaggaaaggaaaggaaggaaagaaagaaagaaaggaaagagagagagagaaagaaagaaagaaagaaagaaagaaagaaagaaagaaagaaagaaagaaagaaagaaagaaagagaaagaaagaaagaaaaagaaaagaaaggagttagggagaaaaaaaccctttctttctttcttttggagatttccggaaaatgtacccttacggatgagagcctgtgtcttcatgggttagagaataaccacgctttgtgcataaaaagttattaagcacaattcctgaattatacataattactagctgtcagtcagttgtgcatttctgtgtatgctggtcttcacttaataagactttatttcacagatcacttggtgtccctacttcactgaaactaggtgattatcttttgaagtctcatttcacataacctaggaggtatatagatttctttaaaaatgtcattgccattattttaaaccttacccatggtatatataaacttacagaaagacagaataggttcattattttaaaccttgcccatggtgtatattagctcacagaaagacatagaataggttcctgccttaagaaaacctgacccacaaaaaagcctgggtttacacaaaagaggaattaagggcggggagcccaccttacaacagaatgaataatagaattttatccaagagcaggcatcctgaggacatttaagacccggatgcatttttccttgttcaagagcacacatccaaaaattgcagtctttctgcgagtcatgatcactctgcacataaagcgtttaggttcagagctcggggaggccattaccatggctgctctctgtctgccctgtgagggtccttggggtggctgcactctggggatggtgctggggctgactgactcacgcggtcgtgtaacacatcagaccttccaaagtcgaacccttgttttgtttcaaggctcaattatgacaggacttggtctcagagcagatcccctccctaggctggagaaggccactttaaaacagatggcctgccccacttcatcatttttatggctctgatctgtgttctccactggcctctggtaaatcaagaatacaagtggacatgaagatctgctttaaaaaataaagaacagaccgggtgcggtggctcatgcctgtaatctcagcatttggaggccgaggtggatggatctcctgaggtcaggagtttgagaccagcctggccaacatggcaaaaccccatctctgctaaaaatataaaaattagctgggcatggtaggcacgtgcctataattccagctactccggaggctgaggcatgagaattgcttgaacccggaaggtggaggctgcagtgagctgagatcatgccacttcactccagcctgggaagcagagcgagactctgtctctaaataaataagtaaatgaattaaattaaataaaaataaagaaccaattaagtcctgtctacaggaaaaggccttacttgctggagaagtagcttgctgtgctggagtagactagtaagttggaacggtgatacagtaccaccttacagagctgctctagggcaccatggggactgtctgagaagcccctggcacactgtaacaggtggcatctggtgtggtgatgatgatgagaatgatgatgaatgtgaaacactctgctctcatttctagaccaagatttacaataaaattatgcacctgtccacctccaacctgtccatgggagaaatgactgctggacagatctgtaatctggttgccatcgacaccaatcagctcatgtggtttttcttcttgtgcccaaacctctgggctatgccagtacaggtactagatgggctgaggggaagggaggggggcagcaggacacacaaccagaatctgctggtccatggccagtaactaggagcacaccgtcttccactccatgcttgcctgtacctttcacacacttggctataccacaggctgtacctctgggtccctcctgtcccatactctgcaagcactgaccatctctcttaatgaccagagaaggcagtatcattaagactttaaaaatggagccaactttataaactatagaaaaatcaagccaggttcaggggctcacacctgtaatcccagcactttgggaggctgaggcaggaagattacatgagcacaggagttcaagactggcctgggcaacacagtgagaccccttctatgcagaaaaaaaaaagaagaaagaaaagaaaaatcgtacatggaatgcccacagatcttaaaagctatgttgtagcaaaatatttaattacatcaaaaagtgttagtgatgtatttttaagcaaaaagagtaagttacaaatagtatatgttgtatgcttactactaaactggaatatatgttatgtatacatttgtacagattcacacatgaaaaagaattggaaaatcacatagtgggattataagtgatttttattttctttatgtgtttctaaattctctaataagcgtgtataagatttggaaatcaacaacatgatacttttagcctaggcaacaaagtgagaccctgtctgtacaaaaaattagctggaagtggtggctcacaactatagccccagctactcagaggctgaggtgggaagattacctaaagtccaggaggcagaggttgcagtgagctacaatcacaccactgcactccagcctgggcgatagagtgacaccttgtctcaaaaacaaacaaaacctggtgttttttagccagatgtggtggtgcgcccctttagtcccagctacctgggagtctgagatggaaggattgcttgaccccaggagttcaaggctgcagtgagcaatgatcacgcccctgcacttcagcctggacaacagagagactcctgtctcttaaaaaataaaaataaaaacgttaaaacatggtatttttttaaagcaagacaacctttggtgctggctcaggaagaggtacattaccccccaataatcagaggagaatcgtcagcatgattgatctgacctcgggcttcatgtgtcccatctcccacccggagctcttccaccacagagtctgatcctgtcctatgcctgggactaaatcttcaccctggtgttcaggccagaaaccgaaatcccagacccattcccagagggcgggaaggttccaccgggagagcttgatgtagcagaaagtgacttgggtgagacaggctgattcaaatacttaacctctctgagccttggtttctttatctatgaaatggggaggctgcccaccctctggagttgctatggcaattcagttagataatgtaagtaacacagcaggcagagtggcccccagagtcttcacttcgtaaatatcagatccctctaccttgcacatgtttggtatgagtgaggtgttaccaatccagaatccattgcttcttgggataaagattccataaaccttcatctccagtgatttgtattggtcctccttacttgtaaagcttagagtttaaaaatattaaaagaaaaaaaggggagaggctcccacagggacacagctagacaagatgagatgcagggaatctgatgttcttttttatgggaacagtcatatatgccatcccccattaccacctacccatgcccagactgcccccgctccattctgccaagacagatcaatgactataaaagctacaaaagggcctggagatctcatctagtttagttaccaaccaaccttttatgcacaagactttctaagctgggtgtggtggctcatgcctgtagtctcagccactcaaaaggctgaggtaggaggatggcttgagcccaagagttcgagtccagcctgggcaacatagagagacctcatctctaacacaattttttttttgaaacatgaaaaatgaagatttctgaccatgcttctctcattagttaacactttgggctgtgagggtctgatgcagagagacacagcctgggaggatcctaacatgtacacagcattcaaaaggctacaagacactttctgttgtgtccccttgaacaagcagtttgtaagattttgttggccaggcatggtggctcgctcctgtaatcccagcactttgggaggctgaggctgatggttcacctgaggtcaggagttcgagaccagcctgaccaatatggtgaaaccccgtctctactaaaaatacaaaaattagccgggcatgatggcgtgtgcctgtagtctcagctactccggaggctgagacaggagaattgcttgagcccaggaggcggagactgtggtgagctgagatcgtgtcactgcgttccagcctgggtaacagagcgagactcggtctaaaaaaaaaaaaaaaaaagaaatcaggttttgtctactaaacctgctgcacggttaccgttactagtactcacagggtttgttgcacatgcatcgttgctaatagtgctaactaatattaacagcccttgccctatgcctggccctgtcccagcccccctcccttgtataatttaacccttgcactgggggtagagattttcatatctactgatttcttacctttgctcatttatcatggagtgtcctttggttttctgtgtttgtatatacctttaccacttatagatttgaccagcactcaagaaccagtgttactcctgggagttaatacaatcccagccccatggcaaagaaactcatgtggttaggattctgtgtgcagcctggttagccacagggcacgtaaggctttttataatattgacatgagtgcagaagccccattcccgtgtaagccctgagggctcttgtttcataatctttttttggtcacatgcacacagctttattgagatataacccactcatttaaagcatacaaatcagtgggttttagtgtcctatattcacagagctgtgcagccatcatcacaaatgtggaagttttcatttccccaaaaagaaacccgtacccattggcagtcactcctcatcttcgcccccagcccttggccaccgtttatctacacatacttttgaaaggctagtgaaactttctcagaaaaataaatgcttgctcaaacatttgggctataatttcaggggcttcatgggtgcccccctgacatttatcaagaacaccaggttaaggaatttagctataatggaggcctctgtgtttcccagtctcctgggtatcagaggcccagagagggcaggtgccttaccctgggccacgcagtgaaccagtggcagcaccatactcacacatctcctttctgcggttccccagtgacagagttctcaggaagctttttcatttattttctgagaggagggtaggccatcttgtattgatctccaactatatgccagccacaattctaggtgcttatcataaaggttcatttaatcttcacaatagtcctgcagagtggacagagtccttcagagtgggcattataatcaccattttaaagatggagaagctgaaaaccagagaggttaagtaactcacccaagactgcacagcaaaaggctggggctttgaaactcagggccacagactccaaagactatgtcctccccactatgctagatttttttcctaacctgtgaataggagacaaaatagtccttttatttctcacagttgctttgcacactcagaatccatgatttcttctgcatgagggccattcagacctgtgcagaagagagtaatggaccaaggagtcttgggagcacctaggaggaggggatgggggagcatgaggaggagccagggaacagcagcagctgcagcaccagctcccaccccagcctctgccagtctcttggaggtggtgtgggtgcagacaccggctcacaaggtgccctgttagtgagcttggggtgccatgggagccttcttgttgtcaggcccaacccaagctggctgaagaacaccctgatggcctccatttgagcacaactaatgaaggactggatgccagagataagtccaggagggtgatgctgcagggcaggccagggaagagggtacttcatctctatcatggtcctctgcccatccatgccagcatctaacacctgttaaacactgggaggcaggtggtgaaggggccacttcccagcctctaagatacctcctaagccaggaggcattctgtgattaaattacagggcctcccacttactcctttatccttgaggcggtgctggaagcttaatgccaatctggtgtagggctctgggactacaggaccaaggcaagcagtcctttctctctctctctctctttttagctaaggaagccagcacatctgttctttgagaaaaagccctgtatttagaggtgtctgcctttgaaggcaacctgagaaactgtcatcttggcgctttggggactggccatttacacttctcataaatattcagaagtaggcagtcatttacataaagctaaatgcagaaggaattctcttttcagggaatacctggcagattcattaaaaaaattaaagaaaccaagagcataagaatgaaaagcgaattctcggaccccaggctggttttttctggcatgggtgcagtaactttgcctctttgctcagttatcacttttttccaatgacagtaaccataagccctgagagccagcaaatagaacaaaaggtgctgtcacaaacattgtgcaatctcatctctgagatttccatctggaaaatagactggagagagttaaggcttcaaccagccttgcagataaatgcagttagttaccagcccagcaaccctctgcttgcatgagagcccattatgctaacctccttttgaaattgctttgtttctcctccttccctgcactccactccccaagataatttggaaacctgggcaccaaggcttgtcccactctaggggactggggaaacagggattttgccagcacctcctggcagggcaaccatcaggtcaaagggacctgacccatgaccccttcctcagatcattgtgggtgtgattctcctctactacatactcggagtcagtgccttaattggagcagctgtcatcattctactggctcctgtccagtacttcgtggccaccaagctgtctcaggcccagcggagcacactggtgagtgcccaaaggtgtgtgtgttttgtccctcttcccctccttccctcgacagcagcaggtctcctcccacacacccacactgtcattgactttgactttgactttgagtaggccacttcacctgtccaggcctcagcttctttgtctgggaaatggagtcaatgggggaggaggctgcctcccggtgaggacaggaggcgggcatggcagtgacagtattgacactcaggccttcctctcgggtgggagacggagcagaagcctctcccctctgactcggggacccctgcaggagtattccaatgagcggctgaagcagaccaacgagatgctccgcggcatcaagctgctgaagctgtacgcctgggagaacatcttccgcacgcgggtggagacgacccgcaggaaggagatgaccagcctcagggcctttgccatctatacctccatctccagtgagttcaccccacacagccagccctgggtgctgctgcgtacatgcaaggagagggtgtcagagctcgggtaagagggggtgcagggacagaagcaggaggccttgagattatccgactcagtaggggagcctcaaactggctctgatagctaagctcccagaaatcaaagtactcttcattcatttatccaacaaacatgcatggaaagcctgctatgtgctggacactgtgctggccctcaggatacagtgatgaggaagagagatgaagtttcattcctcatggaactgatatgttattgacagacagcagcaagtaagtaaatgaccacagttttgaactctcctaagaatgaagactttttagtaagtcagactgagctgtcattgccctggggaagctacaagaaagcttccatccacttggggctatgcaaaagaaaaagactagttatccttaaatatcagaagcccaggctgaaggtactcacaggtgtagggactgaatttatattaaccaagtagtttgggaaccccaagccaaggaagaagaaaaagaccaaaactggtaaaagtcctagagtcccatatacttgaaaccattttactgagaatgtaaaacttttttttctttttttgagatggagtctcgctctgtcacccaggctggagtgcagtggcaaaatctcggctcactgcaacctccacatcccaggttcaagtgattctcctgcctcagcctcccatgtagctgggactacaggcacacaccaccacacccgactaatttttgtatttttagtagagacagagtttcaccatattggccaggctagtcttgaactcctgacctcgtgatccacccgcctcagcctcccaaagtgctggaattacatgcatgagccactgtgcccagcccaaaagattttttagaaattgaaattttagttatggaaattaattcagtgaacaatggtcccctggtcagagtgagggcttacggaggtcaggtgatccatggagtcctggcccaagtttatctcacagttggtctcgtggctccgtggacccatcccatggtggttacttcccaagtgcataattgggatgtagatatttagcaaccagctgacttcacactagttccctgacctgtccagtctaagagtcattatggccaagtggaagcccctggaaagaagaaaacaaaaaagaaaccaaaacttactcagtgcacaggttacatgaatgagtatagctgaagagagaatttttgaattagaagacagatgagtggggattacacagaacgtggcaaggagagtaagttggtagaaccattttacagatgggaaattaaggccagaggggagtgtgttcctgagatccctcctgaggttagtagcatggctcggactagatcctccaaagtctcttaactcctggtctcaggctattttccacaaagagctgggggcctctgtggggtgaagaagacttaggacaccatggggcaccattatgaggccatttcctcctaggagaaaaaaaatctctgggctctgaaaggagtagaattagggtaggaaattaagagaggctaccgaccacctcctccaactaaaattggttcttttggtgccaggaagagacacacctggtgggggagggaaggtggtaatggagggggtgctggtagtgtctcccagatagacccatccaacaagtctcatggagaatgagacggtcactcaggtcatctgcgtattcttggcattcttgctgcctagagagagagtctgatggagctaggtggccaccaagctgtcccactccccaagacagtttggaaacatgggcaccaaggcatgtccctgtctaggggactggggaaatatcccatagcagtgttctcacagtatggggctggccatgaataccccaggagtccaacctccctttgtccagctagaccatggtgtcctatgcctcaggcagggaatgtggtccagtcatcagtggctgggccgtctgccatacatggtgcaagccatggcgttttatgcagaaagtcctgctagcatttgattttctcagaatggagctgtgagcatggcaggcaaccactgtttcctggattcttcaccaagacaccccaagttcctggtctctccccgttatcctcatccctgaccctgtggttctcagagcctccaaacacactcaggctaagcactccatagacaggggaaatttggaaggaacatctagggagctcagaaaagccaatgtccctagccccaggcccacttcaaccttctctctgtcagtcctgcctgcccctggaggctggttacatgaagagtaaccccctgcttgtgtatagccccccagttttgtacaggtttagagacagttcccagcagtaggaacagctgccgaggtgggagagggcttctcccgatagccgggggacttcctctcccaggaacaacagggtggggtagagcaggcttgtcgttgctgagatagagagagggaagggaaacaacaaggaaagtgggggcactgggtccccaaggttcctggcacagcaagcagtgaagttggggcagcctcaggtcatgtagtgggggcaggtgacatctgctttgactgctcctaagagatatgtactcatctcctggattccaaactgcagcctgggacatgttttcttatataaacagcatcaaaagatgtgtgagttcccaggctagcccactgaaccctacctagtgggtgctcattgtcccccagagcccccagaagacaagccgtggctttgtgatgggcctggggccaggaggacctagggatatgttgtgaagagctgagaagactctggaaaaaaggggctctggagccaagcaggagcccgcccaggactcctcacgtgtccaagtcacctagggagagaaacagagcagcccaggttggtccctggaagagagcagcggaggaggggaaaggggagagcccctggggagagctttgaaagtcaagtgctgtttgctcagtgtgtttgcctttccgaggatgtgtttttttttccctccgttagtcagcagtgggagggggagagagacgggtggtagggtgcagggtacctcctggctgcaggcatatgctttgagtgcgtgttcatttacctcctctggacttcctgccttctgttaccagggatcaagacacaggtcattaggcgtgaggtaatggggcatctcttgttctgacccctggcgccagtcttggagtcctgacgctgcagaggagccccagagtcacatttcctgttggggcccatcctgctcatatgcggcaccatcagacttctgggcaggcaagattacctgtgactctgtctgatggtctcgccatcaatatcactgagagtagctgtgtatggagtcccgaactggtacaggataaaacagggggctgaaaagggaatgaatgggcacagtttctctggcatcaaaagtcacatccagaattgatatttcctgttgagtaaaaatagaaatataagttgctcagtggatgttgagtgagccctattcatgtgccccactctgtgccaagcaccaggaaggagggaagggaaaaatgataagatgttctccccgttctccaggagtttatgctccactaagaagtcagagctaacatgcacagaacagtgtggcagcgagagcagaaccgtgtggccagctccatgcttgccgcctagcaagcgtgattgcacttcatcctcataacaacttggtgaggtgtgttgctctgttgtcccattttacagcagagaggactgactctcagtgaattgaaatgtctcagtgaggtcttccacagcaaaaggcgaagcacagagaaggaagtccatgtgggctgggagttcacccagagattcatgtaggggcaatgtgggctgtaccttgcaagatggtgggatttcaatgaggagaagacaaagtgggaggaagctggagacaaggactgtggtctcttcctttagaagtcagttcaatctttttttccttgtggaagcagcataactctaggtggttcctctgtatctgaggacaagctttgtagaggtgacaaaggggtcctaggtcctatcaggcaagcactcgatatgctgccagttcattctgtccattgtgagatacccattccagagcgcttcctctgtgccaggctctacggaggttctggatgttaaagaggaagcaggcatggccctggccctcccagtcttgtgggagattgatcatgcccatgaatagtgaccatgtggtcagagccacagggtcaattccaaatgcccctgtttctcttttgtgttactcacctgactctgggtctttcgtttcttccattcattttttttaaacaaatatttcctgcccaccttctgtgtgccaggcctggggatgcagtgggagaagcctctgtcctcctcagtggaggcgctaactcagaacaggcagtggagaaaaacaacatgacctggagacctggtgccccttccttccccagcatctttgaaattcttttggttgttgttgttttgagatggagtctcactctgttgtcaggctggagtgcagtggcgcgatctcaactcactgcaacctctgcctcccaggttcaagtaattctccctgcctcagcctcccaagtagctgggattacaggtgctctctaccatgcccagtaatattttttgtatttttagtagagacagggtttcgccatgttggccagcctggtctcaaactcctgacctcaggtgatccacctgccttggcctcccaaaatgctgggattacaagcatgagccactgtgcctggcctgaaattcttcaatatctacctgcccttctgccagttggtgcagccacagtgggctgcttatgcatatcctggcctggcttggtggggagcatggctgagggagagccggggcacccatcaattaaggaggtaaagatcagtctgactgagatgcctcctgccacacttcctcagctgccagcaactgacaccattaacctgatttccttccccctctgttgactgcactgactattggactgaatgggaaacagccccgtgcacctcaaaatgcacttcccctcctgcagatgcatcttgcaattaggcccaaactgtgagcctgcatgctcctcccctggccctgcacaggcaacaaagctgaagttaatcagaggtacaaatggctggctatgcctctctgacacgtaacttctggaacatgtatcaatgctttggaaatgaaaagctcctggtattgcaatgccaggctggtgcccataagggccagaaaacattccttgggcaaagccagggggagtgggtgatctgatcccagctcaggtttgttgatttgttgttttgtttgtttcgttttgtatggggcaagggttgagggtatgaaaaacttacactatcatttactaccgtagtccccagaacccagcacaccagcacaaggcctggaacagggataccttttttgaatgaataagtctttttttttttttttttttttttttttgagacagagtttcactcttgttgcccaggctggagtgcagtggcgcgatctcggctcactgcaacctccgcctcctgggttcaagcgattctcctgcctcagcctctcgagtagctaggattacaggtatgcgccaccacgcctggctaatattttggtatttttagtagagatggggtttcaccatgttggccaggctggtctcaaactcctgacctcaggtgatccacccaccttggcctcccagagtgctgggattacaggcgtgagccactgtgcccagccttgaatggataagtcttaagggatatttttggaaaggatattctaaaaaatacccatgtctctacactattgcagaagggctttcagttttgatggcagcctttcaggccagcctacacgcaactaaacttttccataacagcatcacacttacacaagaagaaggttttataatccacttgccattatttaacatagttcttcctccttaactttcaagatctgagcactataatgttcttctttttgtttttgtttttttctaaatcaaattaaggtgagtcacctcaccttgggcctgagttggacagaaatctattcttggctatattccccacccctccaccaccttggaaccttatagaactttatgtggttcaggaaaatgagggcgaggcctcagatcttcaacccatgacagctgtatgcccagctccctgccttcctgtcttacccccagctagggcacaggactgactattgtgcccagagaggtgccagagcctgtaacaaccccagacttcccaggtccagccacatccaccccagagccccaaaagatgatcttcagagagacctttaaaacacaagtagctggtcacttccatccagaccagaacccaagatggctgtgctcttgctgagacatgttggttgtcattgcctccgagcccactttagccctcagctctgtaccagaaatgctgttcctttgggaatcacagccaaagaagagatggagcagttctggaataagaacacaagttcaaactgtcccatatctccccacatcactatctacagttggtctcttcccatggcgatgtccatctgccaccgtggcactggtattgctttgagtgcaggggtctctctttttggcatgttggccctgttactccctgggaactttgagtcttatttggaatgcgtgaagtccctgtgtccggggccagcactgatccacacagctaagtttgcactcatcttccctctcatgtatcatatctggaatggggtctgacacttgatgtgggacctaggaaaaggcctgaagattccccagctataccaatctggagtggttgtcccggttcttactgtactgtcctctgtagggctggcagccatgtgaagaacagaggttcccagcatcatcttcctacacattattacattcacccatctttctgtttctcacttttatctccagcctgggaaaagttctccttatttgtttaaatccttttgtgcttttagatccccttggagcagtagagtaccttgtagaccataagagtggaaaagggtctagttttctccttgtttctaaagatggggtggctgaaaaaactccccttttttgcctacagcttgcctctctgggcctagaagtggttattctgtctccatattggcctttgatttgtgctgagggtcagcttttggctccttcttcctgagacagtggaaacaatgccagctgtgtggcttctgccctgggggctgggggtgaggctttgggtgccactgcctgtgggttgctggcttaaaggacaattctgttcattggtgagagcccaggccattaacacctacgcagtgttattgaaagaagagaggcgggggtggaggggaattagtctatcccagctagagggagataaagagggctagttagttcttggagcagctgctttgaggagaaaatgtatagcttttgacacaacaggaagatccagaaaattatcattgaacatattaaaggttatttctttttcttgcaaaacacacacacacacacacacacacacacacacacgcgaacacacgcagctgatgattctactctcccagccccagccctgaaggggacccagaactccctgcacaaaggctgtccttcaaggggagggtgaaagaagtggaaaatcacattttcattctttagcgtctccatacaacagccagaactgggcagaagctaattatatcagaagcatactccatgttgctgcatcagctttgggatgttcatttttaaatttatttatagcttgtctcattcctcaaaggagttcagggagctacaaaaataaagacaataaaattgaaaaaaattaaattaaaaaaaccatgaccagggaaaatgtgcagtagaatgaagtgtcaattatcacgttttctgactgcaaaatctcccccacggctgatgcaccatcatttactacaacagcccctcttgttggacatttccagtttatttcgtttgggatggtttgttgctgttgctgtggttgtggttttgttttattgaattttgtgttagctgcagctaataccatcttgctgatggctttgcgctgctcttgaatgattactcaggataaatttcctggagacggattataggatcagaaggtctgaacttctgtgtggctctagctacaaagcaccagattgctttccaagagcgttgtagcaatttataatccaacactcagcctattttttggctgggagtcaagccccagaatgtgaaggaggggtcttggcctggagcaggggctgagggatgggtgcacaggacccctccttattggttatttatggggatgggccaggaggagcagaatagaggcccctgccctcccagttgctccttggagtgactgaccccataggggaggggcgaggctacctcacatttagaactatgtagttggtgatggtcaaggtcctaggtctgatgggcatcctcctccctctcctcctcagccagtaatggctgcactatgtcgtatgtcctagatctgggtcccttttgctgtgggaacaccaataatacttacgctgtttcctgccggaaacggtgcaggagggctgtggcatggtagtgggccctggaaaccatctagccttcatgaggaagggcagttaaagcacaggcatgtatgatgttggtattgattaaaagcctcacgggcagagaaattcgccatctgccagggccccagccatacgagggctccagccatacatcctccaggagactgggacctctccaattgcaggagccttgccttccccatcagattaggaattccccgaggatggggacaatgtccttcccacctgcttgagaactcctaaggggcatgtactctgtctccccattgtatctggaacttcctgggagcatagctcctgtctccgtcctcagactgggaatcccctaagggcagaggccatgtccttccacccacttgggattccctgaagttggggaccacatctctgatgtacaatgctttgtatgtactgactgctgcaggattcttggagtaaatgggcagtcaacttcttggactggtattgaccatctggacttcatcagagtgtccaagactttgccattcattagacaggggccatgtgcacaggcagagccctggcctctggcttctggctcctgactcctggtccctctgctttaatttggctaatggcagaaccagactcctttctgggctgccctggaaggggatccttgaatgaaagaggatagatgggaaggtggcagctgacatggttacctcttatgccatgggggggctgctctctctggaaatttaggcctggggtcagggcactgttgagcattttacaccctaggccagaggaggggtgacctgtggagcagggctaagctagtagcccatgaggtatgatgtgtaggcagcacctggggctcacagagcctgttacccatgttatctcctctgaccttggaaagagctggggtgtatgaacaagtatttataagtttacaaaaatcatatgaggaaactgaggcacggggaaggtaaatgacatgccctaggttacacagcttataagtagcagggattctgcccttctgtcacaccaagtcccactgtcttttcttcctggagtccctgtgactgatctaaaggccacatgtttaacagaataaggaggaggcctctgttgcagcaaaccagctaccccacccgcacacagactctaagggacatcctgctttaagctgtccttagttactaatacctcagtgagaatgagtttgaaattttctcaagagccatgggagactaggaagtctctaagcttcatagagagcctggcttggggggacacaggagccaaaggcagaggaagaagtggcagctttgtgcccccagaaacacgtgctcctgacctcacagttggccacagccagccaactctcccatccttctcccaccactttcccgtggggctaacttcaccctgtccacacggagtgacttaacagtttaagccccagagtcgggggccggggtacctgggacaagagtcctgagggaaatggggtgaggaactggaagtgccacagggctagagttctgcccctagcctactggagctgtgccccacaggctggccccactggactgcgctgcctccaagccatcctgggcatctccatgtgtagctgtcacgctcctcccactaaacgcctccctgtgcttcctctgcagttttcatgaacacggccatccccattgcagctgtcctcatagtaagtggatcctttctccatctcttgggggtagggtggagggggagggcgtctgcagtgacaggctgcccagatttggcctttctgcacaggggcctcagaagacaggctccacagccagactgaaaataggatcgaaagtttatagagggtgtggcccctccccaactccagccgaacaggggcctctgcctccaggcctggaagaccggaggcttagtatttagagaaattaaactttcttttaaaaaatagctatccaaatttttaatttttaaagtgaaacatgtgtattgtagaagtgatgggaaatccagaacagaaagctcaaagagaattaaaatcacccataatcccactggtaacatttttaatgtgtttctttccagtctttttttaaggcctatgatatgtcattttctacaaaaataggaatgtgctatgcatgcagttttgcaacctgctcttttaaatttaggaatatgccacacacaattctccatgccactgaatattatgatggtggctttctaaagcaattttgataaaagctgtgtgtgagctgagccatgggggtcaagcagcatgctcctacagaaaggcctgggcccctacgagcctgcagccccctcacccagcctcccatccccatcttctgtgatggctgcagttccttaaaaagatctgcttatttcccccggggccagtgtccctgagctgtgtagagttcacagcctgtcggatacacttgggaattcacttccaatgtgatgtattgagctggttcctggcctggctcctgggggaactgtgggtaacagaggccactgagccagccaggtggctggggcaaagcactgtgcagtttcgtaatcactctgtttacgttatcccgatgaggactggggagatgagcaccccgcctgctgtctgcagagggggccgtgctgacctaacccgagatctcctccctgcttattcccagccaagactgggcaggacagggagtcttggccaggacagggagggagcagcccctgctctccagcttgaagtcctgaacttgttggggacgtttccatgagatgactgtggggatgatgaaggtgtctccaactaaaagatcctcttaggagcctgctccctgacagccctctcatttcccttccagtgctgagcgtttccagtgtgggagggacccacaccctgggccaccctggcctcacttgtgcctctgtccacagactttcgtgggccacgtcagcttcttcaaagaggccgacttctcgccctccgtggcctttgcctccctctccctcttccatatcttggtcacaccgctgttcctgctgtccagtgtggtccgatctaccgtcaaagctctagtgaggtgaggggagggtccgggcgagggcactgggcaggcaggtcctgtgtcagcctcaaggcttgctcgagtgatggccaaaccacagctgtttggtcccggaacacacccccattgctgggccttgctgtagctggtcctggttggtcagagggacattggcctgtatggtttcccagctcgccatccctgagcaaggacttgcttacatacctcccaggagaggggactcactgtcactttcacgacaacttaaaaaaaaaaaaaaaccagtgttgagccaaatgtggaatcctcctaaattctacccactggtcctaacttcaccctccagagccaccaagaatgaggccatcccgtccccacgtggctgccccatggatatcagaaggcatccactgtgtctatctttcccaggccaagtatcccctaccctttccacagcccctgagccctcacagcctcagccagtgaaacagcttcccccaagcgctgggtcctgctctgattggcccacagctcttggaggctcccacttccaggctctagagcctcatggggactctgccactgtcccagaggcattgccctcttgggaatgaaagcctgaaggtagaaggctgaggctttggctgggaaatgccctgtctggagtgagaagatgtccttgggcctctgaagtagctctgcctccttgaaagcaagagcctgtcatgcctctatggagggctggcttgtccttacccatggccagagaaccagtcagtaacaaatgtcctctgtgtcttcagccttgaggaaggtgacacccctgtctcatgggaccctggcaggtactgggaagctggaaggaaggagtagctgttggaatgaagtagctgatagagagggtagcttgcagggggagactctagcatgggttcaaagatggaatggggcataactcagcaaaattatgctctaaggagtatctgaccaggcagtagctggttaaacagggattagctcccatttccacagtcggctgtgctgactcagtttcttgaccagggtgttgtggggtctgaagatcacccctcctcccaccacccactctccagccctatgattctgtgtagaaaccacagatttaagaacgctgcacctgcctgaaaactgttgcactgatcccaaagcgttcatattttcaaacactctggatcccactgtttccaggaatggaacaccagagtagcagaggccttttcagtgaggcagctcaggctctggctgaaggtgggcgcaggacactacctgaagcttcaccccaagagatgagggccagctccactcttcccagtcaccgcctgtgggggagggaggctggacagggcatgaaggcagagcctggtggtctgcccctcccatctaggggtggcgcacagaaagggagactccaggccacagctcacttacaccccagaataaccttgccttgagggtgggatggcttgtctgccccaggcctgttggacatttagcaaaagagaagaaaggggaatacaaacaatcctgagcttcccagaaagctttcacacctccaggatgggagagaatgaactagaagagtgaagcttccagtgcttcctcaggtccacagggaaatctggacaggggagagggtaggaatagccgcctcccccgtgagtaatgacacctcctccagcaggctgttatggggatccgattacataatgctacaaaacagttaacacagtgtctggcatttagtgtatgctcacaaaatactagctattgattctttaccaatcctagtcctaactaaccttaaccctgaccaatccaacaccaaccatccttcagtctaataacccagactaactaacttcaacattaaccctaaaactaaccaatctcacctccaatccagaccccagcctattccagctgactggtcaaccctagcaaaccctggtaacaccaattacctgcccccatgcccactggtctgcccccttcagtgtgggctttgtgggactatacttcaggcctgagatcctgctcagagctctctatcaggctgcgccctctcccctcccctctgcccctggcaggggtgaggggtgtctctgtgcttcccgagcagcgtgcaaaagctaagcgagttcctgtccagtgcagagatccgtgaggagcagtgtgccccccatgagcccacacctcagggcccagccagcaagtaccaggcggtggtgagtgcccggcctccccttgctactcccagcatggtcctctaaggcccaaaacttgggcctgctgtgtcggacttctgccttttttcccaggaagaggggctcccttccctacacagctcccagcccagtgggtcctcacctccaaaccacccccagcccctcagggttgtgaaccgcaagcgtccagcccgggaggattgtcggggcctcaccggcccactgcagagcctggtccccagtgcagatggcgatgctgacaactgctgtgtccaggtgagtcctgctgccccatgcctggccacccagcaccaactcccagagggagctcagcacctggaaagccagaaagctgcatgcttagtcctctgcagaggtcaccctgcctgcctgtacggtccataggagtccagaaaccagggaccaccaagtggggggacccccagccttaggcaagggtcagcatgagaaggccagtctcccactcccctgctctggaagtgatccaggggctggaatcagtgtcttttggctttcatggaggaggggaagccagagactattcactgggaactggctgcctttctgttctctcctgggcggtgggacacgcctaatgaagatcatgggaggctacttcacgtggaccccagatggaat

SEQ ID NO: 15322 - DNA, 83948 bp, Homo sapiens
gggccgggcggcggagctgcaagggacagaggcgcggcaggcgcgcggagccagcggagccagctgagcccgagcccagcccgcgcccgcgccgccatgcccctggccttctgcggcagcgagaaccactcggccgcctaccgggtggaccagggggtcctcaacaacggctgctttgtggacgcgctcaacgtggtgccgcacgtcttcctactcttcatcaccttccccatcctcttcattggtgagtgcgcgcagcgagccgcggaggaggggacgggagagcagggagggaggaggaggcgctgcgcgccgcaccgctcggcgtccccttccggcccgcgaccgccgtccgcctcgttcccggggtcccctgccctgtgtcctgcccgccggtccccgcactcgcacaccagctcatcccttcactcccccggtgcccccgatcccgcgccaaacacagcggacgtttgtgacccatgggatcaccaagttttgcttctgcagggccaagagctgggatggggaaaagggaaagaggaggtctcagcacgcagtgggaaactggagaggggtcgggcctcaccctccgtggcgcagcttagggagccgggtcacccctcccgcaaggcagcctccctgtcagccgcagctgggcctagggaagagggaagcctgtgctttggagtctgggatggaggcccagctaacccctatgctttcaccgggctgagccgcgcagtggtccgtgatctctgacagtcccaggcccgcgccctgggcgaggagaggcgagagctagggacttggattcccttcccccgccaccccacccgggcatgtgtctccagagcgcaacttctcaggctctgcgcaaagtagctccgactcgccgacgcagcgaccccggcgcccttgcttgcaaagttgggcgccacggccgggacaatcgtgcgtgcctctccactgaggtcccccccatctctctccaagaccttgactcttccagaccagtcaagtctatcaactcatagggtgtcccctgcatccccaaaacgtgttcattcactttaagaaaacaagcaaatcttaaaattcatatacagctttggggaagaaaggaaagattgtcacaaaattagatttacaagaggttgctgcagaagcagagttgctagttattaacaaagacagttagatagaaatagaaataaaacatacaaaatatgtgctcatatgtgcatcaaaaatcaaaaaagaacagcatttacacttctgttctcagccaaacggtttattaacctgatgacttgtcacacaagaagttagtatgtataatggggtaccttggcagggcacagtggcttacatctgtaatctcagcattttggtgggctgtgacaggaagactgcttgagtccaggagttcgagaccagcctgggcaacatagtgagaccccccccgccctttctacaaaaaattaaaaattagctgagcatggtgatgtgcgcctgtagtcccagctactcaggaggctgaggcgggaggatcacttgagcctaggagatcaaggctgtagtgagccgtgatcgtggcactgcactccagcagaggcaacagagcaagaccctgtctcagtaaaaaggtgtggtgggggaggtaccagcataggaccaggctgaatgagttggacgtttagtttgtgtgtaccagccttggggatcctcatgtgtaggtgtcaccctcaccatggacccaatgcccaagcacctttctggggttcatgcaccctcttcctcctccaagtgggcaggcatcctgcctctgactgtctctccctgcaggatggggaagtcagagctccaaggtgcacatccaccacagcacatggcttcatttccctgggcacaacctgcggtggatcctgaccttcatgctgctcttcgtcctggtgtgtgagattgcagagggcatcctgtctgatgggtgagtgactgtctgaggactcaggaaagtgaatctgctccagggtacttcctgaaaggcccaaggagatcctagctcacctatattccacaagcccatgtcttttgttactacatccagcagctcagtgtcttctatgtgccaacctctctgagctgggcactggacgcaagtgagtcccaggccctgccatcagtccaggagagcagagggaacacggacctgcatgccaagtcccagtgaaataatgctagagcctattagaatgccacaactccagtgaaaaatgtctggcctcttctacaacctgccggagttaccttcttggaaaaaaaaaaaaatctaaccatgccacccactcttgcataagacctttccttggttctcagctgttttgaagatgtggtctcagatcctcagcccaccattcaaggtcttcacagtcagccccacctatctctggcctcattccccatgcccaccttccgtttgggcctcacagcacactcctcacacctctgctacagcacagatcacactgtatgttaaagtttatgtctatttgcaaaactgtcttcagagtcagaaaggcctaagagttagaatctgagtcttgttcatctttgtgttcacagtgcaaggcatgtgataaacataaacattattcagtccataaacatttattgggtccttaggagaatgaatgaaaccatgttacaaataagtactctgggaggtgagaggaaggcagaattgggcaagctccatggttgagagggctttggagcggagtctggaagggtgactaggcttcagacacacagaggaggaaggagagagagaactggtggtgcctgagggaagggaaaaggcaccaaagagaaaagcaggtagggctagggagcagcgcaggggctggagcattaaacacaggctggggagcgatggaggctgaggctgggaacccaggttggggcatctcaggaggactgtgaatcccagcctgcatgtttgggtcggatttggtcagcagtttggaacagaagagagatgtcatcagcataacacttttaggtgggaacctgaggtgttcagcgcaggctggaggcagggagaatctagaggtataatagaagcaggacttagcattgactgcagtagtctaggtgagcaataactgcagacagaaatggtgtgtcagcagtcagggacagaagaggagcgggagcagccatctcactaaggaagaatccagtaaccagcaaggatgagagactgccaggagagggagtggtggaggagagggatatttggcttgagtatctgaggtccagcgccccctgagctggaatcagattatacccagactgcactcctgcagtgctgcctggctcctgtagttggatggcaggggataggctccctcatcctccctcccgttccccaccttcccttccccaatgtccctgcatcctggcttcagcagtgatctctaaaatacctgcttgacttggaggcagcagctctgcctgcttattaaagtccctagaccagcaagaagaccagaaggcatactgctacacaagcacgtgacaagtccgcctccacccccacccctacaccccttccaaagtagcacaaatgccacagtgagccctcagatgggaaatactcaccagatggtgacagagaaagacacctccgcccttggagaaggaagacctgggtcttcagtgagcactgctgctgtgtaccagctatgggactttgcacaagtcattcaggctttctgggcctcataagcatttataaacatacgataaaacattttagttgccaacttaaaaatgtgtgagaaagtataaggtgtttcaaaattatttcaaggagtaaagaggcaagagttttgaagatccctgggcagggtgttggctgttcccagtgtggccattcatgactgctctctggccttatgaaacaagcatcatagtccctggcttgcctgcttcatggggctgtggagggtgaaattcgagcatggacagggtgcagagcccggagtggcagagcactgggtagactgtgtattcccagaatgtgggaaactggaatgaatcggtccagggatgccctcctgctggctgtcagcagcccctcctgtgtgtggctgtactgcttcagctcagtgcaaagggccatctcctccccagggcacagatcagctcaagctgagtaattgtcatctggtctttgtgagctcctacccccaggcctgagtgaggggcaggaaaagagcagacaggagaagtcacagacccttgtgatacctccagtctaatccagcctgggttttcagagctgtctggaaatttagggggcaggtgggagggggctgattaaggcagccctgatttgatttagagtgagcctcatttagtgactaattaagccatcttaaacctgtagggcttcccctcttcctttgggtattatttctttctgtgatgttctgaattcagaacaatcaaaacagtataagttagtgaagaagatattttttaataactacaatattttcccagaccaccatacactggataaagcctgtatataaaactttacctaatttcttaactaattgaatgtgtattatttaacaaagcagctaaaaactattctatgaagccatgtcatgaaatatttagttcaattatggttaatcctcatcttatttcgtcttataaaattttaacatttctacctcctattgcaaaaaaaagcatttatatcagcatataataaaacatgtctagatgtcagcttaaaaatgtgtgagagagtagagggtgtttcaaaattatttcaaggagtaaagaggcaagagttttgaagatccccaggaagggtgttggctgtgcccagtgttgccattcatgactgctctctggccttgtctgtcttgtaccttctatattagtttgaagaccttttttggagaatattcactaaagaatatcaatatctaccatttcattaaaaaagaaatgtggagtttgccttttcaagttggtttgatgcttattgatgttttcagggacccagcctcttcccatctttccataccatcctgtgtgtgtgtgtcagcctatcttccccatggtcacaaggtggctgcctagctccgggtattgcttagcatgagcagagagggcatgctgccgacatgcctctcctttatgacagagatcattctttctttgacatctcactggccagaatacgtggaccaacactggcaaaggagtatggaattgcatggctgcttaaaccaatcaccatccattccctggggctgggtatattgctgctggagcaaacctgtggtcctcctggcacagaataaggggaagatactctttggtggacagcccacattgcctctacacttgcacctcagtcccaccagacccactgaggtcacaggatagctctcctcatgtccttcctccttctctgttgaactcttatgtatccttcaaagtccagcctggtgccacctcctctgggaagctgtccttggttgcccaccccctcctttgtgctctctcagtctctgtccatcggcagtatcacttccctagcctgctgactccaacagttagctctgagcatggcagccccctccataccatcagcttctcaagggcagggacccttggcacactggatagaagtagcctggtgggcaacagcagcactgaggcagcaagctgtagcaggccatctgggaatggagtgggtaccacagggctggagcagaaagggcaggctgggcagatctgataaagtggctggaggccacatagcctgggcctttcgttccaggctgagcagagtgggttttgctgtctgcaggagggagctgtggaagggcatgatcacgaccaactaaggtgaccctcctcaccaggcccagggaagactgaggcctggaaggaggctctggctgcctctgggtcttacccccaggccacagtccacccacttagaggcctctgtgagttaaggtggagagactatgagctggtattgactgctccattccccatcccgagagaggagacaaaatcagtgaccttggaaatgcctcttcgtgcctcagtttcctcaccccataaaatgggagactaagagtacccactcgatggggtttaatgaagattaaatgggttaacatatatcgcatgcttagaacagtgcctggcacagagtaaatgctccataaatactgactctcatcagtttgttatcacagcctctggggagggcgccagtgctgacttatgctgttcgtgttaaatggggctgtcactgggtgagttgtggcatacaggcccctgcactgttcaagagaccccagcaacccttgtgcttagggctcagcacatagtaaggcctccagatcatatacccagctctactccatgtactggcagctctgcccagcccataccccaaatacgcccattaactaaagggccctgcagcctataaagtgatgctataaaggttcagtgttcagcctttgaaattcaaggcctgggctgctctattgcagtacttagcatgtccccatcctgtctgtttctctctcccatctcagggtgaccgaatcccaccatctgcacctgtacatgccagccgggatggcgttcatggctgctgtcacctccgtggtctactatcacaacatcgagacttccaacttccccaagctgctaattggtaggtgaggtgtaggagggaggggcagtaccttcattcatttcttcagataatgtttactgaggactcattatgtgccagctattgctctaaacagtagagatttggaatagaaaaagaaaaaaatccctgccttcatggagcttacagtctggtgaaggaggatagacaggcaaagacagtgaataaacaagcaaacaaataggtggtggggatgctatgaagaaaatcaagctgagtaaggggtaggggcaatgacaatgttgctatctacacaggatggtcagggaagggctgtggtaactgtgggcatgcagatatttgggggaaggtattccctgcaaggggagtgacaagtgcaaagtcctctgatagggatagatttggcaaagatgtcactgtgggcaaagccaaatgagcaaggggaagagtgggaggtgagggcaggcgtcaggagaggagcgagcaagagtcccaggctctgggcctgagagcctgggtgaactgtggcatcaataactgatgtgacagaggagggggaggtgggctgtggtggggataaagttttctactgggggcatatcgagtttgagatgtcacagagacagccaactcaagtgtcaagttgggctttcatggggaggtcaggacaggagctacactttcaggaggtgggccttgtagatgacatctaaagcttgagcctggggctggctgccgtggctcacacctgtaaccccagcactttgggaggccgaggtgggcggatcacccgaggtcaggagtttgagaccagcctgaccaacatggagaaacccccacctctactaaaaatagaaaaattagctgggcatggtggcacgcatcggtggtcccaggtactcaggaggctgaggcagtcaaatctcttgaacccaggaggtggagattgtagtgagctgagatcgcgccactgcagtccagcctgggtgacagagcaagactccatctagaaggaaggaaggaaggaaggaaggagggagggagggaagggagggagggaggagggagggagaagaaagcttgagcctggatgaggtcacctggggagagaagagaaaggctctgggaccagagcttgaggtttgctaacatttagagagactcgggaaggactgcccacttagagcttctgagatgttaaatactgcaggactggggtcccaggcagaagcaacaggatgatggttggtgtttactgagcatgtgccatggggcaggctccatgccatgttccttacattcattgtcccacaggctaattcccccagcctccttattggtattgttaatatccccattttccagtgtggaccctgaaactgagaggttaaaaataataacagtaaatactcactttgtacttactgtatgccaggccccatcctacctatgtgatatattaattcatttaatccttgcaacaactctatgaggtaggtaccattattattttccctttacatatcagaaaactgaggctcagaggttaaataactggcactagtctagctcgtcaaggggcacagccgggagtctagcatctgtgcaatctcctaatcatttctgagactgcgtgtctaagggccctcagacttcgtccttggggtaaaggtatcaatccgcaggtctgcctctgtgttggggttcagcctgtgtgtctaaggctggggctgtacatctggcagttagactttgttcacactatgtccttaagtcagactgatttttaggtatcacagcatcgaattgacatttggagtctggcacactctgtgctaagccagtgacatcatggtgttgtcagggagtacagggtgtttcttgcactagtcacaggtctgcctttctgtagaaggtgggatctgagctccattaggattatccaggtgatccccctacccctagcccaggggcccccacatgagtatgaatgggagctgggggaagcaggttgagaggggagatgttaaatacaggcttcagagagccaccctgcttccatttctgaagtagctccttgtctgtagagaacccttcattaaccagggcctggctgaccagtgtcctctggaaacaccctgtctggacatctgaggagttcattttctcattctccagcaaacacataatgttctctctttaaagcacaagttatcacccgtggatggatttgtccttttctaaggaacaaagactaactccctccattccccttgttggagttatctccccttgaaaggacactccacagagccagaaattctagaacagggaaaagtggaggggacgtgcctgtgaactgcagggacagaaggaaatgggtattgggagaatggccagccctccaaggggctgatgtctggcctgggtatggagtcccacagaaaggggacctgtgatgcagcttacattgtcccgtgagggaaccatgatcctggaacccagatgaggccaaggaaatgttctctgaaaaagtcatatttgagctgagaactgaaggaactaactgggagaagggaggaaagagtgcttcaggcagaggaaacagcatgtgcaaaggccccaaggcagaaggaacaaaacacattagaaaattcagaagaagaagagtggcgtgggtgcaaagtggaggggagctggactttgggttttgtttgcttgtgcccaggctggagtgcagtggcaccaccttgggtcactacaacctccgcttcctgggttcaagcggattcttgtgcctcagcctgctgagtagctgggaatacaggcgtgtaccaccacactcagataattttttgtatttttagaagagttgggatttcaccctgttgaccatgctggtcttgaactcctggccttaagtgatcaggtctcaacttcccaaagtgttgggattacagccgtgagccaccgcacccacctggaaggtcataccacagatgtttgcctttatcccaacagcaatgggaagttgtgtgtgtgtgtgtgtgtgtgtgtgtgtgtgtgtgtgtgtgtggtttaacatgtttaacataaaatttatcatcttaactgtttttaagtatagtgttctgtggcattaagtatattcacagccgggcatggtggctcatgcctgtaatcccagcaccttggcaggccaaggcaggtgaattgcttgagctcagaagttcgagaccagcctggccaacatgccaaaaccccgtctctacaaaaaacataaaaattagctgggcgtggtaatgtacacctgtagttccagctacttgggaggctgaggtgggagtatcatgggaggctgaggagagaggatcagttgagcctggaaagtggaggctacagtgagccaagattgtgccactgcactccagccaagattgtgccactgcactccagcctggacaacagagtgagaccctgtctcaaaaaaagaaaaaaaaagtatattcacagtgctgtgtagccatcaccactatccatctccagaactttttcatcttcccaggttgaaactctgtactcattaaatgataactccccatttctccctccttacagcccctgacgaccaccattctactttctatctatgaatttgagcactctaggtacctcatctaagcggcatcatgcactgtctttttttttttttttttttttgagatggagtcttgctctgttgcccaggttggagtgcagtggtgcaatctcggctcaccgcaacctctgcttctctggttcaagcgattctcctgcctcagcctcctgagtaactgggactataggtacctgccaccacgcctggctaatttttgtatttttagtagagacggggtttcaccatattggctaggctggtctcaaactcctgatcttgtgatctgcccacctcggcctcccaaagtgctcggattacaggcgagagccaccttgcctggcctatttgtctttttatgacttgcttatttcactgagcataatgtcctcaaggttcatccatgttgtagcatgtattgaaatttccttcctttttaaggctaatattctactgtatggatatgccacattttgtttatctattcgtctgtcagtgggttgcttccacctcttgactcttgtaaatagcactgctatgaacatgggtgcattgaggggttttcgacataatcataataattgctttatggagaccagcttggaggagaacaagatggggaggaagtgtggaaaccaatgagaaggctctcagggtatagcgggaatacagaggacgcatgatgatgcctggacttaggtggtaccacagggatggagagaagtagatagagtcaagctatttaggacgtgaaatagacagcatttgttaatgggagaggtgtggggcgagggagaagaatagagggagaaggaggagtaatgggagctcaccagcagcccccatgttatgcctctttccttccttttccctcttctctcatcaggcattcagcttttgctgagtacttctgtgtctgacaacaggctgagcactcagcactgcaggacaggactatgcaaaaaacctctgggcctagtcctgggtgcactgctaattccctgtgtgaccttgcacaagacatccaagctctctgagcctcggattccccacctgggcaggaagagtaagtccctgcctaagtcatagggttgtaatgaagagcaaagcagaccatatctgttaagtgttagggacaagacaagcatgaggcatattttcaagtctcggctcctgtaggcagctctcactaagggctaaagggcttctgatgcctgggatagaatctgtccggcagagtggagtggaggcagggggacagccttcagctgtggaattcctccagtcctagagaccagcctgagctgggggacattattccagtcctgaggcatgagagcagaaggccgatgcttctgccctccatcctaatgtcctcctgcagggacccaaggtggatggcatcgatccccccgggtgagctcagccctgggcgcatggtggggcccaacatctcaacctgtttcctaaccctgagccaggcaggacagatcccagatttgtgcccaagagatgctctggcatccatgcccaggcccacatagggatagagggcagggtgaaagtctctctccctcactcgggtcctctggagaggggctctgtgtcatgaagctgaccttatccgcatctggtctaggagggaggagggaaggagctgccagtgctaaaatctcccccaccctcaaagggggacttcacaggttattgctggttttggttgttggaagctgacagtgatttattggcagattgaagtgagtgtgtgtgcgagaatttaggatagaatctactgatagcttctgaggtttaccttccccaggtcttaaatctggagataataaaaatataacagctaatgtccaaagagcacccgctgcgtgtgaggctcactgcactaaatgctttccatatgtttctcacaagaaccttctaggtagcactattatgattcccacttaatggatgaggaaactaagctctagaaggctaagtgactaatccaaggtcacacagctattatgtcacaggctctgagcccaggtgtatctggctgcggagccaccaccactaacccctgtataacgctgcctcacagaactgtggctggctctttccgtatcccccatgcccctgctccatcatcatgctgtggtgggctctgaactgtgaggacagggatccaggctttcaccctctctctgtccctagctgccagtgcacttgggcaaggtcacatcctatttctgggcctcagtttcctcatctgtaaaatgaaaggctggattgaatgacctttaagatttccctcacttggaaattccacaagtaagtcattatagcatggagcttgcatgcatgggctccagcgtcaggccagcccagctctgccagttaatgggtgtgtggccttggatctgttacctaacctttctgagcctcatttcctttgtctgagaaattgggggtgacggcagtgtactttctttgaaaagttatggtgaggaatagataagatcatgtgtttaaagtgcttacttggcacagtgcctgtaacttagttaaattcaataaataaatttcccattcttcccatgatcatttatttttaagggacatttgtctgaccagtttgatttatgagattattggtgtttttcatgaatgttaagacgtacgtgcgtcatcttagagtcatgtactctgatatattcacacgtgcacatccacttactcggaaatgtacacacccaggcacgcttattctgtctccttctctgccacatacttgcacacattatgtgagtgtacacacatgatgcacacacgtctctgcgatcttccatctctcctcggcagccctgctggtgtattggaccctggccttcatcaccaagaccatcaagtttgtcaagttcttggaccacgccatcggcttctcgcagctacgcttctgcctcacagggctgctggtgatcctctatgggatgctgctcctcgtggaggtcaatgtcatcagggtgagggtaagcaggccacctgggccagggtggggtgggaagcagaggctctggcctctgtcctgccctgggttcaggcccccaccctgcttctcagccaaactgagaagggatcagcttgttttacccgcccgtgtaaaggggagtggggccgtggcggaaatttcaggatagacactgcatctggcccacgtgtgctctaccccagggtcccagagggagaggggggtgatgggtgtgttcgctgaggttggcggatgactttccgtagaaagggaagataagcatcaggcactggcctctcctactttctttcttcgggggtgggggactttgctttaatgtattcatatcgtcacgctggtaaatgaatgagtaagtgttttgttttcctttctgtttgctcccgcctccctctctcttcctcaccccagactccaaccttccccttcccctgcccctacctccccaggcagcccagactaatgaactcgtttgtctttcccatgctttgtttttattagtataataccatatgtgtctgtctaaataaatacctattcaggttttttcctctcaacacaagtgaatatgtaggtttcccccacggtatttatcttgtaagaatgggatcatattatgcagttttctgcactgtgcttttctcacccaacaaatatctcttgggactccctccaagccatctgatatggctaattccgttttcttaatggctgcataatattccatcgtatggatgagccataatgtgttcagctatttctctatggatgggcatttactttgttgccaagttcttgccttcatgaataatggtgtgttgaacatacttatatatttatgtattgctgcttttatttctatgggagagagtccaaggaatggcgttgctgggtcaaagggtctgtgtattttaaattttgatcagtgttacatattgccttccagaaagactgtaatctgccagcaatgagtgagaaaaccctttccctgccttccaaccagcagtgagggctacagccctttcgaacttggactgcctgcatttctctgactcttctgcttttagttggtgatctgcagggcacaaagctccttatgtgtccccccatccagtgaccctcacaggaaccctgtgatgcaagcaccatcccctttatagatgaggaaacattttagatgaggcttgtccaaaaacaccttgctagtaagtggaggaggcaggattcaaaaccaggtctgcatgacttggagttctgtgaactgtatatgaaacatggtggtatccttagatctgtggagaagatagcatatgagagattcctgctcctccccaacccaacctaaacccaacccagcctagccatggggggttcaaagtcgacctcaatgagcagttacaaagtcaggatgccctgacattggtggccaagaagtgttggggaatccttttcctggtaataattacaggcgaaagatggccccatctgttagagatcaagtgtggaatatcacaaccccagatccttgctggggcaaggtagggagtggtgagaagttggacttacccatcccccatggcccatgtgccccacagagatacatcttcttcaagacaccgagggaggtgaagcctcccgaggacctgcaagacctgggggtacgcttcctgcagcccttcgtgaatctgctgtccaaaggcacctactggtggatgaacgccttcatcaagactgcccacaagaagcccatcgacttgcgagccatcgggaagctgcccatcgccatgagggccctcaccaactaccaacggctctgcgaggcctttgacgcccaggtggtcagtgggggcacagccacaccatctattcactgccttctggtttagggtcacagagagggacctcaaagggcattaggtcaaaatcctggtgggacaagaggggaaactgaggctggtgaggggaagaagcttgccttaagtcacacagtgaaccagggacaggtgcagggctgaggattcataggacaggcacagttggaatggcccttaccgtttaggtcgtctagtccaaagtccttatccagatggggaaactgaggctctgagaagggaagtgaccccactggactctcacatccctgtgctctttcctctgcagcttactgactataaaggttggagtgttcacttgatttggagcaggggtgttagtggcctgatccttatggtaactctatgagttgagccagacaggaatctccccatatcactgaggagcaaattgaggccctgagaaaggctgtgacctgcccagagctggccacagctggcaggcggcagaggcagtctcctggctcccagtccagtgctccttcacttcctctgccctcgcaccagggcagttgctgaggcagacacggtggcaggtggtaatgagtgagtgtggcacatggccacctcctcattccagtgctgtgctcatcacatagtccctgaccagctgtgtgaccttgagcaatcatctggccttagtttccccatctagaccatgttggtgttgatagggccctcccaactgtgcacttgctgattccatgatctcttcctggagttcacctatttgcagaggatgtgaccactgggtttccccagacaacaggagctaggggcatcctgggaggctaggcccagccgtgaattagccctcaggcactctgacctggccatggtctctctgggcagcggaaggacattcagggcactcaaggtgcccgggccatctggcaggcactcagccatgccttcgggaggcgcctggtcctcagcagcactttccgcatcttggccgacctgctgggcttcgccgggccactgtgcatctttgggatcgtggaccaccttgggaaggagaacgacgtcttccagcccaaggtaggcagccccaggggtagggtaaggcaccctctagatggttttcagttgtttctgagagtgcaacaggccaatgtgtgtgagccatggccacactggagtggctcctcacacatgcgcaaagcccatagcagtatccccaccacagaatactctacatctggtcaacagaaatgccagagggcgagcctatgccccaagggtatcctactctcctctcaccgtcactaccatagtacctctcccggtagttaggtcagtccgaaaactgcaggaagtgcttttgtttgtccagtgtctagagcttctgtgacttggatttgttggctttcagttcatgtcatcttagtaaactctttaaaagttttcaagatctgtcttcttcagtcctgtaaaggctggcacttgagctttctgcaggggcatcttgggagctactgtcagaggagagagaagtgggaaaccctcacgagtggagctttgtctctccccactccaaatttcattcaaagctgcccgtagttttattaatatgttggacttttccattaaaatttcttttttaagaaaagtttccatggcttaaaaaacactggagacttattagactagattatatccaatggccttggcagttgtaacgattctgcaaactgaaatttgttggagctagaaaacctttccccggggttatttgccctgcgtggggccgtagcatccacttcgggggctgggcagactgtgctctgttgtctgtttccttgcagccgtttaggtttaaatggccacaaaatgaaaactttttcacccctaataagtttcagagttttagtttccaagtgaggatgtcattataacattttaaccacagacagtctgaaaataatgcagagaatggggaattagggtttttaataatttatgacaccctttgcgtaacatttgttcatctcatgagctccaaaatcgcagccagcagttaatcctcaggaggtttatgttcatttttctggagacataattagtcagctgaacagttttggccacagatatgagatacgttgagtctgatttatgcagcaaactttcattgaacactgctgtgtgccaggcctgggttgggctgtgggaatatgaaagcaatagttatgatgaggatgattaacaatattaacagccacttactgaccacataatacatacctggctgtgtgcaggagttatccatgtgttatttaatccctaaaactatcctttggcgtgagtatattttgcaacatctttactgtggtatacctcaaatactgtacagtttatgagatgataggtattcttatccccattttacagatgagaaagttgaggctcagaaagtttaagtaattttccccagggtctctcagctagttaataacagaggcagaatttgaacacaagactcactccacagtctgggcatttacagccaggaagctaaattgactattattatcaagccatcacctctggctccaaggattatgaaatccaacagtgaggagagaaatcaaaataaaatacttttatgctatgtgttacatgtgactcttaggaggaatattcagggaattgtgggaaaagatagtgattaacttagccagtggtcatgaacagcttcatagaggaggggatgtttgaaaggggtcttgacggatgagtaggaatttgccaggctgccatgggaagatttcttgctcaaccaagaatgcaaggaccacttttgcttatttaaactttgatggcttttgaagccatatctggctttttgagcctctctactttacctggcccataaaagagaggggaagcggctgcttctcttgtctacaggagtgtcacctttggctctagcctgaccataggctaccccagaatacccccattggcgatcctgaagcagcatggagccagttgttaatatcagggggaaatggcacaggccagagcccttatcagagtgtccacaccacgctcttcttcctgtgtttcccaaaacccttgtgggattctgctaaggagagagctctgaggcaggacgtgccaaagagatggcgaaagcacttagaattttagttcatctgaacgttatcattgccgtttttttctctttgtttatacacaaaccctggggtttattaccgtctcattggaatgctcttgtcccagttacttagcacacaaatccctgagacagatggccctgcctcagtggcagtgggccttatcagatttaatattttttccctgcagcccaaacacaatcagaaaatttccgacacagaaacaagagttgaaagtaaatatagtctccagtgtccgcaacaaagaactctccatcatgtggttgcctgggatgtggcttaattctcatgtgggcttctgagctcagaaaatgggggaaagggatcatttactgagatcatttggttcatctcccagcccccaagccattctaatccagagagaaccgagtgctattctggtctttatgaatgacaaagaaggaagctccctagctacatgttgcagtgtttcacagtctgggagaggaagccgttttttctgcccagcctgaatccatcctgcagcagttggcacagcgaggcacctgtggtttattcatcatcactcttccttcctaagatactcagagttggcaagaaacatgtcatccttggtatccgcaaggacgaacatttctgatgtcctctttagttactgaaagtgtctgtgacttgccagatctttgatgctcctgtcaccccgctgccactccccagggaaagctgggacccaggttgggctctgcctatgatctatagctctttccagcctcctctccaacccaacccctactcccaatctgtcacctcccatggatgccactgatctggctgaaggacaagagaattagattcataatgagctgctggtgtctgaaacctgccagcactgccctgggctatcagttgagccaaaggaagaaggaacagtctgggtttgatcgaagggctaaagcttcaaacagcctctaagtctcagtaggaaaatgtgtaggtttgggagggtgtatgtgtttccgaatgagttcccctaagaactgcttatggttctatatgtgtgttctgtttgtccctgtgtcttttggtgtgtctttttctgcgtgtgtgtgtgcatgtgtgtgtgtctatgcccccgtttggattgccatatttgtggctatcattatgagtgacttaatgagtgtatatgcattggtgtttctgtgactttgtggttttgatgcatgggctggcctcttcataaccatgtccatgcagctggtctggcctagagtacctgccttcaattcactagctccttcttggccatcaagactctgctcaaatgtcacctgctccagggagccttcacctggttgaattagatgccccttatctgtgctcacataacatcctatcaaagcgccctgtttctttccctgacttgatcctctgtcccctattgcctgacctctgtgtgcccagcactcagcccactgcctgacacccaggagatgcacgggaaatggttctgcaaagaaggaataatgcagcaattactatatattgagtgcttacacttactgttttttcacatgcactgttacattgacttctcataacaactctctgaagtcccttcatagcctcaccttacagatgaggaaactgaagctaagagaggttgaggaacttacctaaggacacagtggctaatatatgatgagtcaggacctctaagtccaggctcttaaccaccgtgtcaaacagtcttgtatgaatgggtaggtgtgttggtctctgggtggccaaagataattttattctttacccagggcctcccggggctgggacctacggacaactcaccttttgacacctgccaaaataggaaacaagagtccaagtgatcccctctcctttaagcaccagagaacatgtgaaggggacctttccaatcatacctctggcctggcagagacaatggggctccaaactgtagagtcgggagtgctgggttttagtcctacctctgcagctaactcatttattctcctcagcagtcacattctgcaagcctcaaatgcaaaatgtgtaataacttctgtagaaagtacatgggggcatgaagatcattggcttgattgcttttaaaaaatcggtattgagcactactggggaaatccctggaaacaaacacaattcttccctgagagcttgtgaaaatgcaagactagggcctatgattttccaaagcattttcttccaccaagtgtcaggttgtaggtccttggtcttttctctcttgccttggtacctgcagggtgctgaccagtgctatcatatcccctccccgtttcctaggaccctcttctcggtagactccaacagggcctgccttccttgggcagcatggcaggcctcttggctagtctagtacccacttcttttttttttttttttttttttggatggagcctcactctgtctcccaggctggagtgcactggcgcaatcttagctcactgcaacctctgcctcctgggttcaagcaattctcctggcccagcctcccaagtagctgggattacaggcatgcatcaccatgtccagctatttttttgtatttttagtagaaacagggtttcagcatgttggccaggctggtctcaaactcccgacctcaggtgatctgcctacttcagcctcccaaaatgctggaattacaggcatgacccaccacgcctagtcaggtacccacttcttaactgaaacttagctattccaggttctatcccttttaaaccaactctttgaagagaggtctaataatgacccaatgacttatagctgcagtgagatttttattttaacaggtcacaaaattctcaatccacaaaagtagatttctgaccctaggttattttgttgggggcggagagaggaagtcaaaggttttgcagcctttagagctgcaaaaccagaatttgttgttttgttaaaaatgcacaaataccgacgagtatatttaagtaacacccatagtctaacgaacaaacatgatcagttggcttttccagccctcattctccagcctgtgtgttttctgctcattgtaacacagcgtgtgtgtggcattccatgtttctccagagctttcatgagaatcagtggtcttggatgcatagtgttcccatgagtaccttaattacctaaccattccctgtggttggaaatttatatgggtttttgcattctccttctgctctgaccccaaaataaatgtctgtgttcatacagctattaccttatgtgaaattattttctttgggataaattctcatgatgtgttgttgctttaaaatagtggactccagtctccagagctgcgtctctgcagaggacagtgggacagaagaatcccagggcatgttaaaaaggaccgggtcttcctaaacccacatgcctatatttctgacccagtaccagccaggggggcaagtttccatcccccacaagtcacaaacctgtaactgacactaggatgcttaaggtcaaaggcctggacgaggcctagacagtgggtctggggtagtgtttttgacatcactcaggttcatgttcacatgttgtccccttaccagcatgtgaccttgggccagccactaaccctactgaaactcctttttttcatgtatgaaatggggctaataatggtaccctcctcattagggtattgtgaggatagagttttgcacctgataaatattgtctcctgccccttcctcccctggaaattcaggtctctccctgcagcctaattttaaggcccatttttctgcttccagcccacccctgcccttctaccttcgacctcctccctctgcctctccctctggtgcactggcaaatgggacagagagcctcggtagggccttcctcttagagtcttgcacgcatccctcagtggtctccctgtggctgcttcctgctgccaccaacagatacagacccctgtcgcacagatcatggtagagacagtggtgagcaggaccagacagctccagggagcagtgagggctggcttagagaacctctgttaaactgagaggccaccatcaggaagctctgatccaagatccaggaatccctgactctagggaaaggcctccaatgagagcctgggccctctctgcctgattctgattgtggatgtgccctcaaactccttctcatcactttgttccatccctctttaccctgcagcagctcccacaccctgccaaacaggatgcacagtccagggcagtgtctgagaaagagcagagatctgtcttcatggaaatattgatgtggctctgctggggagcaatggatttatcaagatcaaagttttcctgggagttattgatgcttaatttggaaatagacacactgttgatccctggtatctttagcaacaaagttaaaatgtttgtttttcttcactggttgccatctgagatcttgccggaagtacacaagagaaccttaaatttaacaggaggccctgggagcccatgaggctggcgggcttgggtctgaaatcttttcagtctcttgtaagtgatgagctctcattctctcctgagagctctacggtgccatgttttccactggccttttctgctcagtaattgctacattacaggctgttggtaagttcggaacaagggagctgctgattccatttctgtagcagagaacatgcaccgtgagacttgttgtaccagttcaggttttaggtgctctatttattcttgccccattcagaatgctctcccctgggtctgtggccacaatgctaagagtcatatttatgggcctgcagttgtaattgggccccattctgttcccccaagtggaaagatgaacagggtgtaagcaaccttccctgtagttagaaaaacgtttagttggatttatcagtctgatttttcactcataaacaattgcacaagcctttgcaagcccagagggtcttgtaataatgatggccgtggtccattatggcacagtgatgtgttctacggtggtcattttgctggcaatgacagtcacctctgaacttctctttccaacagacacaatttctcggggtttactttgtctcatcccaagagttccttgccaatgcctacgtcttagctgtgcttctgttccttgccctcctactgcaaaggacatttctgcaagcatcctactatgtggccattgaaactggaattaacttgagaggagcaatacaggtacttggatgattattttttcactttgccataagaaccattattaggaataatgtccatgagtgttattcatcctcatggacactcaagaataattctgctgtaaatttattttttgttgcccattaacgatgttttaaaacagtaaccattgacaaggcagtgtgggatagtggaaaatatcttgggctgaacttgggagacagtgtagctctggctctggttctgccttggactgggtctgaaaatccagctgctcagcccttggcttgaaagtggtagacgtcactaattgatcacagcactctttctgaccaagggtaaatgcaaccttggaatcctctctaagtggctgttccagagttctgctaccagacagtcttctttgggtgtgaaaaaaggaatgtgcttgacatacaaggtctagatagcctctaagacagggtcccctctaagatggggtattggtccatggcctgttaggaactgagccacacatcaggaggtaagcagtgggagcaagcattactacctgagctctgcctcctgtcagatcagcggctacattagactctcataggagtgcgaaccctattgtgaactgtgcaggcaagggtctaggttgtgtgttccttatgagaatctaatgcctgatgatctgaagtggaacagtttcatcctgaaaccatccctctcccccaggtccatggaaaaattgtcttccacgaaaccagtccctggtgccaaaaaggttgaggaccactgctctaagttctatttgaacccttaagtcttgctcactaatgagagtgacctatttggtctgttgggtcacttaagtctaggctcttggtcctgccttctgtgatttccttcttagagtttctggaaagatgatcaaagccagggagtgttcagggcccctctgaagaaggtgatgatgagagttgtccaagtcccagggtcttcactaggattttggttcagctatcagactagagagacatcctgattgagagtagtttaaatgggatagaagtttgtttattcttcagatagagtcagggctgacacaggagctactcaatgatcagagacctggcttcttctgtcatgttgctctgccagccttcttttgtgacttttgtctccatagccatggtgggtattgaaactgccactatatttacatttaaactagccagaagaagggacaagaggagggaacgcattttccttttaaaatggtaatacctgatttgcacataccctctcgcatcccattggtgagaaagtggccaaatggccgtatctagagagtctagaaagagcttggtctttattcttgacagctatatatgcactgctagaaattctctgtgcaaagaggagaatgggcattgggaataactagatgcagctatgcctagtgatgtccatgaagttgtggtaaaatcctgaagctaccttgttctttggaaatgttcctcagaatcattaacattagtcatgtgggagacaggagaagaagctctgcagaaaagggaccgagaggacaaggatatagcttgggctggggacaatgtcagagtccaaactctggctatcttggaatagtctgtgtgaacggtgccctcccaagttgtgcagtgcacaacctgtgcagctatatatggcaaccctgcccatccccagtggtttctcactgggaaagcagagtatttcctcagggatgtcattatgtgacaatagtggaaaaagcccaggaaaatctaagaccttctaagactcatgggggcccagagctgggaggaaccaagctgttgctcagttcagaaaacttctctagaaatcccagcctctcctcacacccctccagtgacaggcagacttgcaccaccacaagcaacagccacttttgtggttgggcagttttgtaattaaatatactaatgtgtgtatgtcataaattacattttccaattatgccaaaagagccaaaaatggttttttaatggttagcatataatcgtttttatcaaattgcttgaatctttcatgttaataagagagattcattactatgccacaaaaagcaaatactggcattaattatagaaacaaattaggggggtggagcgcaatggctcatgactgtaatcccagcgctttgggaggctgaggcgggtggatcacaaggtcagaagtttgagaccagcctgaccaacatagtgaaaccccatctctactaaaaatacaaaaattagccaggcatgttggcgtgcacctgtagtcccagctactcaggaggctgaggcaggagaatcgcttgaacccagcaggtggaggttgcagtgagctgagatcgtgccactatactccagcttgggcgacagagtgagacttcatctcaaaaaaaaaaaaaaaaaaaaagtggctcatgcctgtaatcccagcactttgggaggccaaggcgggtggatcacaaggtcaggagatcgagaccatcctggctaacatggtgaaaccccgtctctactaaaaatacaaaaaaaaattagccaggcatggtggcgggtgcctgtagtcccagctactcgggaggctgaggcaggagaatggcgtgaacccaggaggaggagcttgcagtgagccgagatggcaccaccgcactccagcctgggcgacacagcaagactctgaaaaaaaaaaaaaggaaagaaagaaggaaaggaaaggaaagaaaggaaaggaaaggaaggaaagaaagaaagaaaggaaagagagagagagaaagaaagaaagaaagaaagaaagaaagaaagaaagaaagaaagaaagaaagaaagaaagaaagagaaagaaagaaagaaaaagaaaagaaaggagttagggagaaaaaaaccctttctttctttcttttggagatttccggaaaatgtacccttacggatgagagcctgtgtcttcatgggttagagaataaccacgctttgtgcataaaaagttattaagcacaattcctgaattatacataattactagctgtcagtcagttgtgcatttctgtgtatgctggtcttcacttaataagactttatttcacagatcacttggtgtccctacttcactgaaactaggtgattatcttttgaagtctcatttcacataacctaggaggtatatagatttctttaaaaatgtcattgccattattttaaaccttacccatggtatatataaacttacagaaagacagaataggttcattattttaaaccttgcccatggtgtatattagctcacagaaagacatagaataggttcctgccttaagaaaacctgacccacaaaaaagcctgggtttacacaaaagaggaattaagggcggggagcccaccttacaacagaatgaataatagaattttatccaagagcaggcatcctgaggacatttaagacccggatgcatttttccttgttcaagagcacacatccaaaaattgcagtctttctgcgagtcatgatcactctgcacataaagcgtttaggttcagagctcggggaggccattaccatggctgctctctgtctgccctgtgagggtccttggggtggctgcactctggggatggtgctggggctgactgactcacgcggtcgtgtaacacatcagaccttccaaagtcgaacccttgttttgtttcaaggctcaattatgacaggacttggtctcagagcagatcccctccctaggctggagaaggccactttaaaacagatggcctgccccacttcatcatttttatggctctgatctgtgttctccactggcctctggtaaatcaagaatacaagtggacatgaagatctgctttaaaaaataaagaacagaccgggtgcggtggctcatgcctgtaatctcagcatttggaggccgaggtggatggatctcctgaggtcaggagtttgagaccagcctggccaacatggcaaaaccccatctctgctaaaaatataaaaattagctgggcatggtaggcacgtgcctataattccagctactccggaggctgaggcatgagaattgcttgaacccggaaggtggaggctgcagtgagctgagatcatgccacttcactccagcctgggaagcagagcgagactctgtctctaaataaataagtaaatgaattaaattaaataaaaataaagaaccaattaagtcctgtctacaggaaaaggccttacttgctggagaagtagcttgctgtgctggagtagactagtaagttggaacggtgatacagtaccaccttacagagctgctctagggcaccatggggactgtctgagaagcccctggcacactgtaacaggtggcatctggtgtggtgatgatgatgagaatgatgatgaatgtgaaacactctgctctcatttctagaccaagatttacaataaaattatgcacctgtccacctccaacctgtccatgggagaaatgactgctggacagatctgtaatctggttgccatcgacaccaatcagctcatgtggtttttcttcttgtgcccaaacctctgggctatgccagtacaggtactagatgggctgaggggaagggaggggggcagcaggacacacaaccagaatctgctggtccatggccagtaactaggagcacaccgtcttccactccatgcttgcctgtacctttcacacacttggctataccacaggctgtacctctgggtccctcctgtcccatactctgcaagcactgaccatctctcttaatgaccagagaaggcagtatcattaagactttaaaaatggagccaactttataaactatagaaaaatcaagccaggttcaggggctcacacctgtaatcccagcactttgggaggctgaggcaggaagattacatgagcacaggagttcaagactggcctgggcaacacagtgagaccccttctatgcagaaaaaaaaaagaagaaagaaaagaaaaatcgtacatggaatgcccacagatcttaaaagctatgttgtagcaaaatatttaattacatcaaaaagtgttagtgatgtatttttaagcaaaaagagtaagttacaaatagtatatgttgtatgcttactactaaactggaatatatgttatgtatacatttgtacagattcacacatgaaaaagaattggaaaatcacatagtgggattataagtgatttttattttctttatgtgtttctaaattctctaataagcgtgtataagatttggaaatcaacaacatgatacttttagcctaggcaacaaagtgagaccctgtctgtacaaaaaattagctggaagtggtggctcacaactatagccccagctactcagaggctgaggtgggaagattacctaaagtccaggaggcagaggttgcagtgagctacaatcacaccactgcactccagcctgggcgatagagtgacaccttgtctcaaaaacaaacaaaacctggtgttttttagccagatgtggtggtgcgcccctttagtcccagctacctgggagtctgagatggaaggattgcttgaccccaggagttcaaggctgcagtgagcaatgatcacgcccctgcacttcagcctggacaacagagagactcctgtctcttaaaaaataaaaataaaaacgttaaaacatggtatttttttaaagcaagacaacctttggtgctggctcaggaagaggtacattaccccccaataatcagaggagaatcgtcagcatgattgatctgacctcgggcttcatgtgtcccatctcccacccggagctcttccaccacagagtctgatcctgtcctatgcctgggactaaatcttcaccctggtgttcaggccagaaaccgaaatcccagacccattcccagagggcgggaaggttccaccgggagagcttgatgtagcagaaagtgacttgggtgagacaggctgattcaaatacttaacctctctgagccttggtttctttatctatgaaatggggaggctgcccaccctctggagttgctatggcaattcagttagataatgtaagtaacacagcaggcagagtggcccccagagtcttcacttcgtaaatatcagatccctctaccttgcacatgtttggtatgagtgaggtgttaccaatccagaatccattgcttcttgggataaagattccataaaccttcatctccagtgatttgtattggtcctccttacttgtaaagcttagagtttaaaaatattaaaagaaaaaaaggggagaggctcccacagggacacagctagacaagatgagatgcagggaatctgatgttcttttttatgggaacagtcatatatgccatcccccattaccacctacccatgcccagactgcccccgctccattctgccaagacagatcaatgactataaaagctacaaaagggcctggagatctcatctagtttagttaccaaccaaccttttatgcacaagactttctaagctgggtgtggtggctcatgcctgtagtctcagccactcaaaaggctgaggtaggaggatggcttgagcccaagagttcgagtccagcctgggcaacatagagagacctcatctctaacacaattttttttttgaaacatgaaaaatgaagatttctgaccatgcttctctcattagttaacactttgggctgtgagggtctgatgcagagagacacagcctgggaggatcctaacatgtacacagcattcaaaaggctacaagacactttctgttgtgtccccttgaacaagcagtttgtaagattttgttggccaggcatggtggctcgctcctgtaatcccagcactttgggaggctgaggctgatggttcacctgaggtcaggagttcgagaccagcctgaccaatatggtgaaaccccgtctctactaaaaatacaaaaattagccgggcatgatggcgtgtgcctgtagtctcagctactccggaggctgagacaggagaattgcttgagcccaggaggcggagactgtggtgagctgagatcgtgtcactgcgttccagcctgggtaacagagcgagactcggtctaaaaaaaaaaaaaaaaaagaaatcaggttttgtctactaaacctgctgcacggttaccgttactagtactcacagggtttgttgcacatgcatcgttgctaatagtgctaactaatattaacagcccttgccctatgcctggccctgtcccagcccccctcccttgtataatttaacccttgcactgggggtagagattttcatatctactgatttcttacctttgctcatttatcatggagtgtcctttggttttctgtgtttgtatatacctttaccacttatagatttgaccagcactcaagaaccagtgttactcctgggagttaatacaatcccagccccatggcaaagaaactcatgtggttaggattctgtgtgcagcctggttagccacagggcacgtaaggctttttataatattgacatgagtgcagaagccccattcccgtgtaagccctgagggctcttgtttcataatctttttttggtcacatgcacacagctttattgagatataacccactcatttaaagcatacaaatcagtgggttttagtgtcctatattcacagagctgtgcagccatcatcacaaatgtggaagttttcatttccccaaaaagaaacccgtacccattggcagtcactcctcatcttcgcccccagcccttggccaccgtttatctacacatacttttgaaaggctagtgaaactttctcagaaaaataaatgcttgctcaaacatttgggctataatttcaggggcttcatgggtgcccccctgacatttatcaagaacaccaggttaaggaatttagctataatggaggcctctgtgtttcccagtctcctgggtatcagaggcccagagagggcaggtgccttaccctgggccacgcagtgaaccagtggcagcaccatactcacacatctcctttctgcggttccccagtgacagagttctcaggaagctttttcatttattttctgagaggagggtaggccatcttgtattgatctccaactatatgccagccacaattctaggtgcttatcataaaggttcatttaatcttcacaatagtcctgcagagtggacagagtccttcagagtgggcattataatcaccattttaaagatggagaagctgaaaaccagagaggttaagtaactcacccaagactgcacagcaaaaggctggggctttgaaactcagggccacagactccaaagactatgtcctccccactatgctagatttttttcctaacctgtgaataggagacaaaatagtccttttatttctcacagttgctttgcacactcagaatccatgatttcttctgcatgagggccattcagacctgtgcagaagagagtaatggaccaaggagtcttgggagcacctaggaggaggggatgggggagcatgaggaggagccagggaacagcagcagctgcagcaccagctcccaccccagcctctgccagtctcttggaggtggtgtgggtgcagacaccggctcacaaggtgccctgttagtgagcttggggtgccatgggagccttcttgttgtcaggcccaacccaagctggctgaagaacaccctgatggcctccatttgagcacaactaatgaaggactggatgccagagataagtccaggagggtgatgctgcagggcaggccagggaagagggtacttcatctctatcatggtcctctgcccatccatgccagcatctaacacctgttaaacactgggaggcaggtggtgaaggggccacttcccagcctctaagatacctcctaagccaggaggcattctgtgattaaattacagggcctcccacttactcctttatccttgaggcggtgctggaagcttaatgccaatctggtgtagggctctgggactacaggaccaaggcaagcagtcctttctctctctctctctctttttagctaaggaagccagcacatctgttctttgagaaaaagccctgtatttagaggtgtctgcctttgaaggcaacctgagaaactgtcatcttggcgctttggggactggccatttacacttctcataaatattcagaagtaggcagtcatttacataaagctaaatgcagaaggaattctcttttcagggaatacctggcagattcattaaaaaaattaaagaaaccaagagcataagaatgaaaagcgaattctcggaccccaggctggttttttctggcatgggtgcagtaactttgcctctttgctcagttatcacttttttccaatgacagtaaccataagccctgagagccagcaaatagaacaaaaggtgctgtcacaaacattgtgcaatctcatctctgagatttccatctggaaaatagactggagagagttaaggcttcaaccagccttgcagataaatgcagttagttaccagcccagcaaccctctgcttgcatgagagcccattatgctaacctccttttgaaattgctttgtttctcctccttccctgcactccactccccaagataatttggaaacctgggcaccaaggcttgtcccactctaggggactggggaaacagggattttgccagcacctcctggcagggcaaccatcaggtcaaagggacctgacccatgaccccttcctcagatcattgtgggtgtgattctcctctactacatactcggagtcagtgccttaattggagcagctgtcatcattctactggctcctgtccagtacttcgtggccaccaagctgtctcaggcccagcggagcacactggtgagtgcccaaaggtgtgtgtgttttgtccctcttcccctccttccctcgacagcagcaggtctcctcccacacacccacactgtcattgactttgactttgactttgagtaggccacttcacctgtccaggcctcagcttctttgtctgggaaatggagtcaatgggggaggaggctgcctcccggtgaggacaggaggcgggcatggcagtgacagtattgacactcaggccttcctctcgggtgggagacggagcagaagcctctcccctctgactcggggacccctgcaggagtattccaatgagcggctgaagcagaccaacgagatgctccgcggcatcaagctgctgaagctgtacgcctgggagaacatcttccgcacgcgggtggagacgacccgcaggaaggagatgaccagcctcagggcctttgccatctatacctccatctccagtgagttcaccccacacagccagccctgggtgctgctgcgtacatgcaaggagagggtgtcagagctcgggtaagagggggtgcagggacagaagcaggaggccttgagattatccgactcagtaggggagcctcaaactggctctgatagctaagctcccagaaatcaaagtactcttcattcatttatccaacaaacatgcatggaaagcctgctatgtgctggacactgtgctggccctcaggatacagtgatgaggaagagagatgaagtttcattcctcatggaactgatatgttattgacagacagcagcaagtaagtaaatgaccacagttttgaactctcctaagaatgaagactttttagtaagtcagactgagctgtcattgccctggggaagctacaagaaagcttccatccacttggggctatgcaaaagaaaaagactagttatccttaaatatcagaagcccaggctgaaggtactcacaggtgtagggactgaatttatattaaccaagtagtttgggaaccccaagccaaggaagaagaaaaagaccaaaactggtaaaagtcctagagtcccatatacttgaaaccattttactgagaatgtaaaacttttttttctttttttgagatggagtctcgctctgtcacccaggctggagtgcagtggcaaaatctcggctcactgcaacctccacatcccaggttcaagtgattctcctgcctcagcctcccatgtagctgggactacaggcacacaccaccacacccgactaatttttgtatttttagtagagacagagtttcaccatattggccaggctagtcttgaactcctgacctcgtgatccacccgcctcagcctcccaaagtgctggaattacatgcatgagccactgtgcccagcccaaaagattttttagaaattgaaattttagttatggaaattaattcagtgaacaatggtcccctggtcagagtgagggcttacggaggtcaggtgatccatggagtcctggcccaagtttatctcacagttggtctcgtggctccgtggacccatcccatggtggttacttcccaagtgcataattgggatgtagatatttagcaaccagctgacttcacactagttccctgacctgtccagtctaagagtcattatggccaagtggaagcccctggaaagaagaaaacaaaaaagaaaccaaaacttactcagtgcacaggttacatgaatgagtatagctgaagagagaatttttgaattagaagacagatgagtggggattacacagaacgtggcaaggagagtaagttggtagaaccattttacagatgggaaattaaggccagaggggagtgtgttcctgagatccctcctgaggttagtagcatggctcggactagatcctccaaagtctcttaactcctggtctcaggctattttccacaaagagctgggggcctctgtggggtgaagaagacttaggacaccatggggcaccattatgaggccatttcctcctaggagaaaaaaaatctctgggctctgaaaggagtagaattagggtaggaaattaagagaggctaccgaccacctcctccaactaaaattggttcttttggtgccaggaagagacacacctggtgggggagggaaggtggtaatggagggggtgctggtagtgtctcccagatagacccatccaacaagtctcatggagaatgagacggtcactcaggtcatctgcgtattcttggcattcttgctgcctagagagagagtctgatggagctaggtggccaccaagctgtcccactccccaagacagtttggaaacatgggcaccaaggcatgtccctgtctaggggactggggaaatatcccatagcagtgttctcacagtatggggctggccatgaataccccaggagtccaacctccctttgtccagctagaccatggtgtcctatgcctcaggcagggaatgtggtccagtcatcagtggctgggccgtctgccatacatggtgcaagccatggcgttttatgcagaaagtcctgctagcatttgattttctcagaatggagctgtgagcatggcaggcaaccactgtttcctggattcttcaccaagacaccccaagttcctggtctctccccgttatcctcatccctgaccctgtggttctcagagcctccaaacacactcaggctaagcactccatagacaggggaaatttggaaggaacatctagggagctcagaaaagccaatgtccctagccccaggcccacttcaaccttctctctgtcagtcctgcctgcccctggaggctggttacatgaagagtaaccccctgcttgtgtatagccccccagttttgtacaggtttagagacagttcccagcagtaggaacagctgccgaggtgggagagggcttctcccgatagccgggggacttcctctcccaggaacaacagggtggggtagagcaggcttgtcgttgctgagatagagagagggaagggaaacaacaaggaaagtgggggcactgggtccccaaggttcctggcacagcaagcagtgaagttggggcagcctcaggtcatgtagtgggggcaggtgacatctgctttgactgctcctaagagatatgtactcatctcctggattccaaactgcagcctgggacatgttttcttatataaacagcatcaaaagatgtgtgagttcccaggctagcccactgaaccctacctagtgggtgctcattgtcccccagagcccccagaagacaagccgtggctttgtgatgggcctggggccaggaggacctagggatatgttgtgaagagctgagaagactctggaaaaaaggggctctggagccaagcaggagcccgcccaggactcctcacgtgtccaagtcacctagggagagaaacagagcagcccaggttggtccctggaagagagcagcggaggaggggaaaggggagagcccctggggagagctttgaaagtcaagtgctgtttgctcagtgtgtttgcctttccgaggatgtgtttttttttccctccgttagtcagcagtgggagggggagagagacgggtggtagggtgcagggtacctcctggctgcaggcatatgctttgagtgcgtgttcatttacctcctctggacttcctgccttctgttaccagggatcaagacacaggtcattaggcgtgaggtaatggggcatctcttgttctgacccctggcgccagtcttggagtcctgacgctgcagaggagccccagagtcacatttcctgttggggcccatcctgctcatatgcggcaccatcagacttctgggcaggcaagattacctgtgactctgtctgatggtctcgccatcaatatcactgagagtagctgtgtatggagtcccgaactggtacaggataaaacagggggctgaaaagggaatgaatgggcacagtttctctggcatcaaaagtcacatccagaattgatatttcctgttgagtaaaaatagaaatataagttgctcagtggatgttgagtgagccctattcatgtgccccactctgtgccaagcaccaggaaggagggaagggaaaaatgataagatgttctccccgttctccaggagtttatgctccactaagaagtcagagctaacatgcacagaacagtgtggcagcgagagcagaaccgtgtggccagctccatgcttgccgcctagcaagcgtgattgcacttcatcctcataacaacttggtgaggtgtgttgctctgttgtcccattttacagcagagaggactgactctcagtgaattgaaatgtctcagtgaggtcttccacagcaaaaggcgaagcacagagaaggaagtccatgtgggctgggagttcacccagagattcatgtaggggcaatgtgggctgtaccttgcaagatggtgggatttcaatgaggagaagacaaagtgggaggaagctggagacaaggactgtggtctcttcctttagaagtcagttcaatctttttttccttgtggaagcagcataactctaggtggttcctctgtatctgaggacaagctttgtagaggtgacaaaggggtcctaggtcctatcaggcaagcactcgatatgctgccagttcattctgtccattgtgagatacccattccagagcgcttcctctgtgccaggctctacggaggttctggatgttaaagaggaagcaggcatggccctggccctcccagtcttgtgggagattgatcatgcccatgaatagtgaccatgtggtcagagccacagggtcaattccaaatgcccctgtttctcttttgtgttactcacctgactctgggtctttcgtttcttccattcattttttttaaacaaatatttcctgcccaccttctgtgtgccaggcctggggatgcagtgggagaagcctctgtcctcctcagtggaggcgctaactcagaacaggcagtggagaaaaacaacatgacctggagacctggtgccccttccttccccagcatctttgaaattcttttggttgttgttgttttgagatggagtctcactctgttgtcaggctggagtgcagtggcgcgatctcaactcactgcaacctctgcctcccaggttcaagtaattctccctgcctcagcctcccaagtagctgggattacaggtgctctctaccatgcccagtaatattttttgtatttttagtagagacagggtttcgccatgttggccagcctggtctcaaactcctgacctcaggtgatccacctgccttggcctcccaaaatgctgggattacaagcatgagccactgtgcctggcctgaaattcttcaatatctacctgcccttctgccagttggtgcagccacagtgggctgcttatgcatatcctggcctggcttggtggggagcatggctgagggagagccggggcacccatcaattaaggaggtaaagatcagtctgactgagatgcctcctgccacacttcctcagctgccagcaactgacaccattaacctgatttccttccccctctgttgactgcactgactattggactgaatgggaaacagccccgtgcacctcaaaatgcacttcccctcctgcagatgcatcttgcaattaggcccaaactgtgagcctgcatgctcctcccctggccctgcacaggcaacaaagctgaagttaatcagaggtacaaatggctggctatgcctctctgacacgtaacttctggaacatgtatcaatgctttggaaatgaaaagctcctggtattgcaatgccaggctggtgcccataagggccagaaaacattccttgggcaaagccagggggagtgggtgatctgatcccagctcaggtttgttgatttgttgttttgtttgtttcgttttgtatggggcaagggttgagggtatgaaaaacttacactatcatttactaccgtagtccccagaacccagcacaccagcacaaggcctggaacagggataccttttttgaatgaataagtctttttttttttttttttttttttttttgagacagagtttcactcttgttgcccaggctggagtgcagtggcgcgatctcggctcactgcaacctccgcctcctgggttcaagcgattctcctgcctcagcctctcgagtagctaggattacaggtatgcgccaccacgcctggctaatattttggtatttttagtagagatggggtttcaccatgttggccaggctggtctcaaactcctgacctcaggtgatccacccaccttggcctcccagagtgctgggattacaggcgtgagccactgtgcccagccttgaatggataagtcttaagggatatttttggaaaggatattctaaaaaatacccatgtctctacactattgcagaagggctttcagttttgatggcagcctttcaggccagcctacacgcaactaaacttttccataacagcatcacacttacacaagaagaaggttttataatccacttgccattatttaacatagttcttcctccttaactttcaagatctgagcactataatgttcttctttttgtttttgtttttttctaaatcaaattaaggtgagtcacctcaccttgggcctgagttggacagaaatctattcttggctatattccccacccctccaccaccttggaaccttatagaactttatgtggttcaggaaaatgagggcgaggcctcagatcttcaacccatgacagctgtatgcccagctccctgccttcctgtcttacccccagctagggcacaggactgactattgtgcccagagaggtgccagagcctgtaacaaccccagacttcccaggtccagccacatccaccccagagccccaaaagatgatcttcagagagacctttaaaacacaagtagctggtcacttccatccagaccagaacccaagatggctgtgctcttgctgagacatgttggttgtcattgcctccgagcccactttagccctcagctctgtaccagaaatgctgttcctttgggaatcacagccaaagaagagatggagcagttctggaataagaacacaagttcaaactgtcccatatctccccacatcactatctacagttggtctcttcccatggcgatgtccatctgccaccgtggcactggtattgctttgagtgcaggggtctctctttttggcatgttggccctgttactccctgggaactttgagtcttatttggaatgcgtgaagtccctgtgtccggggccagcactgatccacacagctaagtttgcactcatcttccctctcatgtatcatatctggaatggggtctgacacttgatgtgggacctaggaaaaggcctgaagattccccagctataccaatctggagtggttgtcccggttcttactgtactgtcctctgtagggctggcagccatgtgaagaacagaggttcccagcatcatcttcctacacattattacattcacccatctttctgtttctcacttttatctccagcctgggaaaagttctccttatttgtttaaatccttttgtgcttttagatccccttggagcagtagagtaccttgtagaccataagagtggaaaagggtctagttttctccttgtttctaaagatggggtggctgaaaaaactccccttttttgcctacagcttgcctctctgggcctagaagtggttattctgtctccatattggcctttgatttgtgctgagggtcagcttttggctccttcttcctgagacagtggaaacaatgccagctgtgtggcttctgccctgggggctgggggtgaggctttgggtgccactgcctgtgggttgctggcttaaaggacaattctgttcattggtgagagcccaggccattaacacctacgcagtgttattgaaagaagagaggcgggggtggaggggaattagtctatcccagctagagggagataaagagggctagttagttcttggagcagctgctttgaggagaaaatgtatagcttttgacacaacaggaagatccagaaaattatcattgaacatattaaaggttatttctttttcttgcaaaacacacacacacacacacacacacacacacacacgcgaacacacgcagctgatgattctactctcccagccccagccctgaaggggacccagaactccctgcacaaaggctgtccttcaaggggagggtgaaagaagtggaaaatcacattttcattctttagcgtctccatacaacagccagaactgggcagaagctaattatatcagaagcatactccatgttgctgcatcagctttgggatgttcatttttaaatttatttatagcttgtctcattcctcaaaggagttcagggagctacaaaaataaagacaataaaattgaaaaaaattaaattaaaaaaaccatgaccagggaaaatgtgcagtagaatgaagtgtcaattatcacgttttctgactgcaaaatctcccccacggctgatgcaccatcatttactacaacagcccctcttgttggacatttccagtttatttcgtttgggatggtttgttgctgttgctgtggttgtggttttgttttattgaattttgtgttagctgcagctaataccatcttgctgatggctttgcgctgctcttgaatgattactcaggataaatttcctggagacggattataggatcagaaggtctgaacttctgtgtggctctagctacaaagcaccagattgctttccaagagcgttgtagcaatttataatccaacactcagcctattttttggctgggagtcaagccccagaatgtgaaggaggggtcttggcctggagcaggggctgagggatgggtgcacaggacccctccttattggttatttatggggatgggccaggaggagcagaatagaggcccctgccctcccagttgctccttggagtgactgaccccataggggaggggcgaggctacctcacatttagaactatgtagttggtgatggtcaaggtcctaggtctgatgggcatcctcctccctctcctcctcagccagtaatggctgcactatgtcgtatgtcctagatctgggtcccttttgctgtgggaacaccaataatacttacgctgtttcctgccggaaacggtgcaggagggctgtggcatggtagtgggccctggaaaccatctagccttcatgaggaagggcagttaaagcacaggcatgtatgatgttggtattgattaaaagcctcacgggcagagaaattcgccatctgccagggccccagccatacgagggctccagccatacatcctccaggagactgggacctctccaattgcaggagccttgccttccccatcagattaggaattccccgaggatggggacaatgtccttcccacctgcttgagaactcctaaggggcatgtactctgtctccccattgtatctggaacttcctgggagcatagctcctgtctccgtcctcagactgggaatcccctaagggcagaggccatgtccttccacccacttgggattccctgaagttggggaccacatctctgatgtacaatgctttgtatgtactgactgctgcaggattcttggagtaaatgggcagtcaacttcttggactggtattgaccatctggacttcatcagagtgtccaagactttgccattcattagacaggggccatgtgcacaggcagagccctggcctctggcttctggctcctgactcctggtccctctgctttaatttggctaatggcagaaccagactcctttctgggctgccctggaaggggatccttgaatgaaagaggatagatgggaaggtggcagctgacatggttacctcttatgccatgggggggctgctctctctggaaatttaggcctggggtcagggcactgttgagcattttacaccctaggccagaggaggggtgacctgtggagcagggctaagctagtagcccatgaggtatgatgtgtaggcagcacctggggctcacagagcctgttacccatgttatctcctctgaccttggaaagagctggggtgtatgaacaagtatttataagtttacaaaaatcatatgaggaaactgaggcacggggaaggtaaatgacatgccctaggttacacagcttataagtagcagggattctgcccttctgtcacaccaagtcccactgtcttttcttcctggagtccctgtgactgatctaaaggccacatgtttaacagaataaggaggaggcctctgttgcagcaaaccagctaccccacccgcacacagactctaagggacatcctgctttaagctgtccttagttactaatacctcagtgagaatgagtttgaaattttctcaagagccatgggagactaggaagtctctaagcttcatagagagcctggcttggggggacacaggagccaaaggcagaggaagaagtggcagctttgtgcccccagaaacacgtgctcctgacctcacagttggccacagccagccaactctcccatccttctcccaccactttcccgtggggctaacttcaccctgtccacacggagtgacttaacagtttaagccccagagtcgggggccggggtacctgggacaagagtcctgagggaaatggggtgaggaactggaagtgccacagggctagagttctgcccctagcctactggagctgtgccccacaggctggccccactggactgcgctgcctccaagccatcctgggcatctccatgtgtagctgtcacgctcctcccactaaacgcctccctgtgcttcctctgcagttttcatgaacacggccatccccattgcagctgtcctcatagtaagtggatcctttctccatctcttgggggtagggtggagggggagggcgtctgcagtgacaggctgcccagatttggcctttctgcacaggggcctcagaagacaggctccacagccagactgaaaataggatcgaaagtttatagagggtgtggcccctccccaactccagccgaacaggggcctctgcctccaggcctggaagaccggaggcttagtatttagagaaattaaactttcttttaaaaaatagctatccaaatttttaatttttaaagtgaaacatgtgtattgtagaagtgatgggaaatccagaacagaaagctcaaagagaattaaaatcacccataatcccactggtaacatttttaatgtgtttctttccagtctttttttaaggcctatgatatgtcattttctacaaaaataggaatgtgctatgcatgcagttttgcaacctgctcttttaaatttaggaatatgccacacacaattctccatgccactgaatattatgatggtggctttctaaagcaattttgataaaagctgtgtgtgagctgagccatgggggtcaagcagcatgctcctacagaaaggcctgggcccctacgagcctgcagccccctcacccagcctcccatccccatcttctgtgatggctgcagttccttaaaaagatctgcttatttcccccggggccagtgtccctgagctgtgtagagttcacagcctgtcggatacacttgggaattcacttccaatgtgatgtattgagctggttcctggcctggctcctgggggaactgtgggtaacagaggccactgagccagccaggtggctggggcaaagcactgtgcagtttcgtaatcactctgtttacgttatcccgatgaggactggggagatgagcaccccgcctgctgtctgcagagggggccgtgctgacctaacccgagatctcctccctgcttattcccagccaagactgggcaggacagggagtcttggccaggacagggagggagcagcccctgctctccagcttgaagtcctgaacttgttggggacgtttccatgagatgactgtggggatgatgaaggtgtctccaactaaaagatcctcttaggagcctgctccctgacagccctctcatttcccttccagtgctgagcgtttccagtgtgggagggacccacaccctgggccaccctggcctcacttgtgcctctgtccacagactttcgtgggccacgtcagcttcttcaaagaggccgacttctcgccctccgtggcctttgcctccctctccctcttccatatcttggtcacaccgctgttcctgctgtccagtgtggtccgatctaccgtcaaagctctagtgaggtgaggggagggtccgggcgagggcactgggcaggcaggtcctgtgtcagcctcaaggcttgctcgagtgatggccaaaccacagctgtttggtcccggaacacacccccattgctgggccttgctgtagctggtcctggttggtcagagggacattggcctgtatggtttcccagctcgccatccctgagcaaggacttgcttacatacctcccaggagaggggactcactgtcactttcacgacaacttaaaaaaaaaaaaaaaccagtgttgagccaaatgtggaatcctcctaaattctacccactggtcctaacttcaccctccagagccaccaagaatgaggccatcccgtccccacgtggctgccccatggatatcagaaggcatccactgtgtctatctttcccaggccaagtatcccctaccctttccacagcccctgagccctcacagcctcagccagtgaaacagcttcccccaagcgctgggtcctgctctgattggcccacagctcttggaggctcccacttccaggctctagagcctcatggggactctgccactgtcccagaggcattgccctcttgggaatgaaagcctgaaggtagaaggctgaggctttggctgggaaatgccctgtctggagtgagaagatgtccttgggcctctgaagtagctctgcctccttgaaagcaagagcctgtcatgcctctatggagggctggcttgtccttacccatggccagagaaccagtcagtaacaaatgtcctctgtgtcttcagccttgaggaaggtgacacccctgtctcatgggaccctggcaggtactgggaagctggaaggaaggagtagctgttggaatgaagtagctgatagagagggtagcttgcagggggagactctagcatgggttcaaagatggaatggggcataactcagcaaaattatgctctaaggagtatctgaccaggcagtagctggttaaacagggattagctcccatttccacagtcggctgtgctgactcagtttcttgaccagggtgttgtggggtctgaagatcacccctcctcccaccacccactctccagccctatgattctgtgtagaaaccacagatttaagaacgctgcacctgcctgaaaactgttgcactgatcccaaagcgttcatattttcaaacactctggatcccactgtttccaggaatggaacaccagagtagcagaggccttttcagtgaggcagctcaggctctggctgaaggtgggcgcaggacactacctgaagcttcaccccaagagatgagggccagctccactcttcccagtcaccgcctgtgggggagggaggctggacagggcatgaaggcagagcctggtggtctgcccctcccatctaggggtggcgcacagaaagggagactccaggccacagctcacttacaccccagaataaccttgccttgagggtgggatggcttgtctgccccaggcctgttggacatttagcaaaagagaagaaaggggaatacaaacaatcctgagcttcccagaaagctttcacacctccaggatgggagagaatgaactagaagagtgaagcttccagtgcttcctcaggtccacagggaaatctggacaggggagagggtaggaatagccgcctcccccgtgagtaatgacacctcctccagcaggctgttatggggatccgattacataatgctacaaaacagttaacacagtgtctggcatttagtgtatgctcacaaaatactagctattgattctttaccaatcctagtcctaactaaccttaaccctgaccaatccaacaccaaccatccttcagtctaataacccagactaactaacttcaacattaaccctaaaactaaccaatctcacctccaatccagaccccagcctattccagctgactggtcaaccctagcaaaccctggtaacaccaattacctgcccccatgcccactggtctgcccccttcagtgtgggctttgtgggactatacttcaggcctgagatcctgctcagagctctctatcaggctgcgccctctcccctcccctctgcccctggcaggggtgaggggtgtctctgtgcttcccgagcagcgtgcaaaagctaagcgagttcctgtccagtgcagagatccgtgaggagcagtgtgccccccatgagcccacacctcagggcccagccagcaagtaccaggcggtggtgagtgcccggcctccccttgctactcccagcatggtcctctaaggcccaaaacttgggcctgctgtgtcggacttctgccttttttcccaggaagaggggctcccttccctacacagctcccagcccagtgggtcctcacctccaaaccacccccagcccctcagggttgtgaaccgcaagcgtccagcccgggaggattgtcggggcctcaccggcccactgcagagcctggtccccagtgcagatggcgatgctgacaactgctgtgtccaggtgagtcctgctgccccatgcctggccacccagcaccaactcccagagggagctcagcacctggaaagccagaaagctgcatgcttagtcctctgcagaggtcaccctgcctgcctgtacggtccataggagtccagaaaccagggaccaccaagtggggggacccccagccttaggcaagggtcagcatgagaaggccagtctcccactcccctgctctggaagtgatccaggggctggaatcagtgtcttttggctttcatggaggaggggaagccagagactattcactgggaactggctgcctttctgttctctcctgggcggtgggacacgcctaatgaagatcatgggaggctacttcacgtggaccccagatggaatccccacactgtccaacatcaccattcgtatcccccgaggtatggcccagtccacccctccagcatgcccctccccatgtcccactgaataacatagagataaaaagacaaagctgcatttattgagcacctactctctgctcattcttggtgtatgccctgggtatattatagaaggggaaggctacattctagaggcttccgtgtgctgggtgggagtgaagcactaaggacagggtaaaattgccagccttaatgtcaaaccatccattgcagacagtataggtaatgcacaaaaagatcagaagtgggtagccaaggaacgcaagtggaagtgatggggtttctgagaatggacaaaggccctgaggccatgaggcaggaggattttctggcagaggcagccatgagcaaagtatggaggtgggttggaggtgggacccaggatggtgtttcttgggaccacaaggagcctgggctcatactaggagcatgggaaaggagaagcgagtgcttaggaagggtggcggggcaggaaatcagagagggggaaggacctggggagccagaggaggatgttgatttccagaaggaaaggattaaagagggagaggacttgctggggattctaggtaggaagaaagaaaacaggggccccagggttgggtgcatctgtctgtctgtctttctgggtaatggttgttcagactcccccggccccactcacatctgccaccctccctccctgcaggccagctgactatgatcgtggggcaggtgggctgcggcaagtcctcgctccttctagccgcactgggggagatgcagaaggtctcaggggctgtcttctggagcaggtaatacatgtatcctcagggcccagtggaggggaaatctccttttaaccatcctcctcagttgaggatgcacacacatttattggagggcccactctgtgttcagtgaggactcaataaatgctgctaatggatattctcatcatcatcactagtacgtattcacctcttactatgcgcaggttctttgctaagtcctttgcatgcattatttcatttaatttttatgataactaacaaggtccatactgttctcaattctcatttatagaggaaggttaaactatttgtcctaattcacacagctaataagtggcagagctggaattgaaactcagttctgtcagactctgaatcccatggttactcagatgcacggcagtaatttcccagtgtgggaaattgcaacaccaacattggtttccagcttggtcctgagctgcactgacctacacaccataagtgggtgttctgaagatccagatgtaaccaataaatgttggtttctgggcaaagatcactgtcttaattaaagagccagaaccccaggctcagtcaatcacgaatctgttatttatacccacctacttccaagaagcacttgaaactagttgatgaaagattcatgtaaaaatcaaaaccacaatgagataccatctcacacccgttagaatggtgatcgttaaaaagtcaggaaacaacaaatgctggagaggatgtggagaaataggaacgcttttacactgttggtgggagtgtaaattagttcaaccattgtggaagacagtgcggtgattcctcaaggatctagaaccagaaataccatttgacccagcaattccattactgggtatatacccaaaggattataaatcattctactataaagacacatgcagacgtatgtttattgcagcactattcacaatagcaaagacttggaaacaacccaaatgcccatcaatgatagactggataaagaaaatgtggcacatatacaccatggaatactatgcagacataaaaaaggttgagttcgtgtcctttgcagggacatggatgaagctggaaactatcattctcagcaaactcacacaggaacagaaaagcaaataccacatgttctcactcataagtgggagttgaacaatgagaacacatggacacagggaggggaacatcacacactggggcctgtctgggggtggggggcaaggggagggatagcattaggagaaatacttaatgtagatgaagggttgatgggtgcagcaaaccaccatggcatgtgtatacctatgtaacaaacctgcacgttctgcacgtatatcccagaacttgaagtataataaaaaaagatgcatgtaaaataaaaccctttaaaaaggtaagaaaataggaactgagaaatgaagagggtaaaaagatgttcagcaacctgggcagaggacaactacagccatcaacataaaacctggctctgtgccctctggtagccaagggaaaaagggatctctgggctttggagtattcatttaggaataaaagttgcagccaatcagcagaagggcaagctttccctaccaatcatttctaggggaaaattattgaaggtgtcaggtttttcataagcatgagtacagaactgagcagggagaaagactttgggcccaatgtctgaatatcaacatgcacccccgtttcctgcatttccaagatgtccctgaatggtgtatccaaaagatggcaaatttccctcctcagtggggtcgtgggctagcagatgagccccttgggtttcccatcacctcccatcagggactgtgatgtctttgggggcagaggggtctttgcctccattcgccattttatttgggagatttttcaacatagcctgactgggaaggcccaggtattcggtttgagatcatattgccttattccgactgcctctccagcctttggagggaggagcccttttctgctgtccaactgcatgcctgcagcaagaagacaagagtccccagtgcactgtgagctgaagaaagtaaccaatatttattgggtacctcctatgggccatgccctttgctaagtgcattgtcaacatgatctcatcaagcctcctactaagtttaggaggggagtgttgttaccccatttcacagaagcagaaactcaggctcagagaagttgggtgacttactagtcagtgtgtggagcagagactctgcccatgttctttccctcaaacctggtcactgctggggcccccagggcctagtcctaagggttattgtccaagccccatgtagtggtcaggctggatctgggctctcctccaaggcagggcttttccagaaggattgcagggctcagacactggagctgcccctgccttgacctgctcagcatggatgtcaaaacccactctgaacctggtccctttgccctgctttcttctcctcccccaccctcatgccctcatgtggcatcgtgcctgcctcaggagctctccttgtcctatgtagatgaagcaggcatgattggcaggggtctgctctgccctgcctcagtccccacctcttctccaagctgtgccaaccctccgggtctgactgctgcccctctctcttaggaaacctctgccccagcccagggaacacaaggagcctctccaaggcagaggaccctaagcacttcttttttttattattttttattttattttaggttctgagatacatgtgcagagtgtgcaggtttgttacatagctatacatgtgccatggtgctttgctgcacctatcaacctgtcatctttttaagccccacatgtattaggtatttgtcctaatgctctccctcctcttgcctcccaccccccgacaggctcggtatgtgatgttcccctccctgtgtccacgtgttctcattgttcaactcccacttatagtgagcacatgtggtggttggttttctgttcctgcctaagcacttattataggccaggcactgtgcaggcacctcatcatctcagtcagtctgcaccgaactctgtgcagtagatattattatatcctcatttatcagattaggaaactgaggtgaagcaagttgtccaaggccacccagctgttaaatggcagaagtgggatttgcacctaggtgctcaagtgcattggtttgccaccatgtgctcaaagagaaggggcacaagagcctcatgaagaaggcatagctagcctgacagtccaaaggccagcagccgctgtggccatgactcacacacacctgcctcctcccagaactgccacgtgggtcctcacagctctgtccttatcaacacttactctcctttacaggtagcctaggccccagctcccagctctgttcgaggctcgcagaggggcggtagtgaaggggtctcatttctccaggatcctctttgctctctcgcccggtcctggtccagcttccctttcaagcatagtgaagtgcatttgttagcttgcagccaaccctgggaaatcatgagaatttgttcccaagtcaactcattctccagcgtccacagtgacgtattcactcacccagttgagcgcctagtgtatactagaccctgtgacagcaacaggagtgcaaaggtgactaagacgtggcccctgctttttttttttttttttttttttgagacggagtctcgccctgttgcccaggctggagtgcagtggtgcgatctcagctcctcacaagctctgcctcctaggttcaagcgattctcctgcttcagcctcccaagtagctgggactacaggtgtacaccaccatgccggctaattttttgtatttttagtagagacggggtttcactatgttggccagggtaatctcgaactcctgacctcatgatccgcccgcctcagcctcccaaagtgctgggattacaggcatgagccaccacccctggccggccccgcttttaagagaggggagagaagacctgggccttagaagagctcagaggaaccacaattgactctgcagtcaaggagaggaggctcactgcggatgtggtatttgagccttgaaggatgagtgtggtttcatcaagtagaaaaggcagggatgggaaagggaggtggtccaggcaggggtgatggtgtgggcaaagccttgctgatattaaagaacatagttctgtgcacctggaacactggatgcatggggtgcattatgaaagatgggactgaagaagtgaacttggcttagatcccatgtagtaggtctgagaagtaagatttaacccaaaggttgcaaaagaaccatgcttgtgataaaggatgatggattggggaaacagagaaaaagacagacagactgtaggaagggaggtattagcaaataatcataacacagtgtgaggtgtgcattaatattcactcattccaagtattgatcaagaagagaggtaggtactgggttaggaaacagcttgggcaaatgcatggggaaatgagagatgtcaagatgcattctaatggcagcctcttgaagatcttaagttgtttttggttcactcatttcgcaaatgaattcatttagcaaaagcactatggatacagtgcttacctctaggaagtaagttttagcccaaatgctgcagaaggatcatgcttatgacaaaggatgatggactggggagagagaaaaagaaaagacagacagactccaggaaggaaggtcagtctgcagctccttatagtggctaggagaaggagtctaggcagatacgactcaattagcttcatctgctgtttgtctctcaaaatctagacatgtgcactgctctggctggcccacctatcctgggcattgagttaagtgtgggggctgtgtgttgagagtccccctccattactggcaggaactccacacctcagacattgagccccaggtctgcagggagaagacgtgcttgcaaagtgagctaaaagcaaaacagcctctgacctggcaagcattcccaagtctgcacgcctgcagccagaggagagggtgatgccaggctgctgctcagatgcttttcagccatacccaggccaagacctggtgaccaggcagccagaaggagttccaggaggcacaaggcaggaagttgggggattaggaggtgtagaatggagaatgctctggggagatgggtgctttgttggtgcaactattcgtttattcctccagtgaccacgtgagcagtatggctgcacacacaggctctgcagccaagctgcctgggttcacatttggtctctgtgctttggaaaatttcataagctttctctaccagtttcccttattacccatgagattgatgtgaggattaacctagcatgtagtaaatatcctataaatattattattcaatagtgtacttctttgccaggaacaaaattcacctgttcctctttaaatgtcctccagtctgtctcctgggaaagattcttgtgagctccctggggacagggaccatattttgtttgtctcactgtatccgtagtgctttttgctaaacgaattcacttgctaaatgaatgaaccaggaacaacttaagaccttcaagaggctgccattataatgcatcttgacatctctctcctttccacatgcctttgtccgagctgtttcctaacccagtatttcactacccctcttctccatcaatatttggaatgagcaaataccgttagtgcatacctcacatggtattataattatttgctaatgcgtctgtctcctccatgactctgagctccttgagggattattccatgttgtaccccaggtgccccatgcagatgtgtattttgtgcactgttctgtgtaggctacaaaggaaaaggcctagcacctgcccttggggagctcacccacccaggatggacagaggtgtgcagacagagctgcagggtgggcacaaagggtccatctgctgaagtcctgcagatgcagccccgagcttgtccctcacgtcagcagcctggctcctggtctcagagagaactgtgtggttcccaagcattcactttaggaagaatcacttgcccctccctggctctctgcttcaaggaactgtgacaaccttgggatttgcaaactctctctttaatccttaagaggaaaatgttttggtaaaaagtcaagattagcagatacactcgggtgaaattctttccctggaaataaagaatagagccattaatatccacagtagagtgactttaaatgcccccggggggtcagcaggaaccagggccctgaggaaaggatcagcgtggggaagaggctcccacttccctgtgaggagctgcacatgcagtctcactggagctccctgctgcaatgctgttgcctgtggtggttggtgtggatgctgcctgccaagagccctgattccccaggaagagagaaaaaggcttctctcaggacggccctggtcgcatctgcctgtacaattcctggagcctttggggagctgaagtcaggggctcaagtgcccctgggtttcctggaggaggcaggtgtggtgagacagctgacagacaggagaagggatgctctgaggaagtgactgtccagccatgggaaccagatggcccctggctgtagtcctgatgctgccacttgctagctctgtgaccttgagcaggttacttcacctctctgagacagactcactgtctggacaatgagtaaaaccctacctttcctgtctcagagatttggcaatgggacccaatgacatcaattggaaaggatgctgtgggtgaaaggtaacctttcaggacagcgacaagcctgtctgggcaggatgaatgggctgtggagccctgtatatcctagctcactctttgaacctcagtttccacttcttccctttttatttattgccggggtcttaaatgagtgttgggggtatctgattctccctctgcctgtacttttggggccaagcactgagctgaaaagacaattcctcctagttctccaagcctacaacctgccccctaaccagctgtgagctgtaatacattctccagtgtcactgtgaggtttgtgccttcacccccattttatagatcaggaaacagaggctcctccaagtaaaggagcttgcctcagatttcacagccaatgagtggaaaagcctctgggattcaaatgtcagagcccatatttttcctacttctcgcacctgttatcatatgctgcctcttcctttaacctgcagttccctcccttcacctccaccgtctcaatccttcccactctttaaggttcagttcagctatgacttcttctatgaggctctactcattttctcagatttcttcctcctccaaatttcttgtaaaaattatgttttttctctgattctaaaagaatgcacattacattagaaaagatacacaagcatacagaagataaaaaccacctaatatcccatcacccagaagcttccagtttttctttatgcatttgcatatgcatttgtgtttacttttccccaaaagttctccgatactttgtcctacttttcttttgacccttataacttcctgacttcggtacctttctgatttgccctaccagagtgtgagcccctggaaggcagcctctgcaccctgattcaggttgccacacatatgccagctcctagtgggctggagggaaggacatgcggttggggaactggaagactcatgctttcagctgtgtgcttcctccctagagtgcaggcagaggaggaatcgaatcccctcagcactcttgtaaagaccacagcaatgagtgagagatggtgcctgccagacataccattctttacttttcagcttaaaacagatacaaagtttggggaggctcactggaggaggcttggggctacactggaaagagaagaacttggattcacaccccagcttcccctcttcccagctctgtcacatttgcaaactctgagtctcagtatcctcatgtgtaaaatggggatagggtttatagggttgtaaggatgagatgatgagttgtttgcaaacaacttctcacagtgcacagtgaaggtcagcaatgagagccagccccgccctttcttctttccaaatgattaatatatctgttaccagcctccattcattatatagctctgtcatgtgctaagcaccatgggggctgaaaaagatgttcttcctgccttaaaattccactggggatgaacaaattacacgggagctgatcagagaggaaggcagtccattatgagggctaattgagcagtgcagaccatgttgcaaactgagttagggcctggagagcttactgtgtgctggggtcctcaggaatgccacagatgcatcaataaccacctctgctactctggaagtagtcacatcaggaagactccagagataagcttatctgggctgtggccacagagctggaatttgtaagctttaggtttctatgtctcatgttaccagcttgtctataaattgtaaattacagccatctgatggttagggaatatgaagtttggttaagagaatgaaatgagaccacgaagattagagaacaggaaaagaggggactggggactacatacccatcagaatcttcattcagtcctgaccctcagcaggagggggatttcatcaggctcatttccatccttgatttcgtccatcctggttctcctgacaaggggcatttatcagagttatggcatgggaaatcacaggggagtaatgtaccatggcatttaagagtatgaacgttggagtcggagctattttctccgctacttactagctgtgtgactttgggcaagttacttagcctttctctgagcctcactttctttatctgtaaagtgagggcgatcagaataaacctccttcatatggttattttgagctttataaagagacaatactggctgagcacggtggctcactgccagtaatcccagcactttaggaggccaaagctggaggatcgcttgagcccaggagttggagaccagcctgggcaacatagggaatgagactcctgtctctacaaaaaatatacaaaaattagtcaggcatggtggtacgtgcctgtaatcccatctactcaggaggctaaggcaggaggatcgcttgagcccaggaggtggaggttgcagtgagccaagatcacgccattgtactccagcctgggcaacaggagtgaaaccctgtctgagagagagagagagagagaaaatactactatggtgcttataaaagttcaataaattttagctgttgttagtattattaaagtaagatctgtatgaaaataaagcagattttttcccccaaatgttcatgtcagaagtatatatttcattggcaaggggctgcttctggaaggttgagaggtatcctgggggaggggatagagcactggcaaaattggcatcacaattcaagtcacctcactcagtgttttttaagttatcaaaatccacagtatgaaaagcatttgacattacagtccactatatttatgcatttataaacaagagaaaaaatcacgaaaaatacagtaccacgtgcagtacacactgattccatctattctttttttttctttttcctcaaatgcacttgccgcctacttattccagacccaatgattgggtccctatccacagtttggaaaacactataagaaatgattgtgtcctctcactttccctctctgggatttagttttccaactataaaatgctcctgatgcccagccagcctcaccgctgctccgagtcaatgccaggaacgctgatttagcacatgctatttggagggtacccatccaggtgctgtgggagggacagagattgagaagagtgctttctgaccccacagaggccatttggaaaccctgggaatgggtgggagggttggaggtggggattgcttctcccctaagactcagcgtgatggaaaggcaatggggtgggaactaactggtgttggtctgtcccatttgtgtcccagcagccttcctgacagcgagataggagaggaccccaggtacagccttgggactgggtcagaagtgggtctcaacaaagggaaggggtagggtgggggtggaggacttgtgggtgggtaatgctgagtatggattcagggatgtgcagcctacatattttcagagacatggggctaaggcctgcattctcaatgagggcaaaatttggttcttggggacagaaaacacttagacattgcaatgctttgtggctgtccaaagtaccaaacagatgccagtatatctgtggtgctgaaatttcatggtgaatggagtcagaaaatagactagcgattgccagggtctggtgggagagagagggaagggactgccaatgtgtatgggatttgttttggggaagataaaaatgttttggaattagatagtggagatagttgcacaacctggtgaacgtacttttagtttcagaggttttctaaacctctgatttttttttaagtgacaggaaagacagaaaaaagtatatctaaaaaggctctaggggtgatcatggaaaagaaagttaagaaatatgactgtaaggaaaggagatgggtgtccctcaggccaggcagaaaattcagtcttgttgctttatgttcatgtgcaaatctaaaaaatccaagtgatatagattaatgaggctctgagtccctcaaaaccttccctccccttacctctccaaaaaacacttgagataccctagaggtggtatgaagtcaggatgggaaggttggctcagctttgcaaataagtttaagcctctggcctttgctctccaacaccaaagaggcttcactttggtatattttctctgccctttctccctccttgtccccaactgtcagtatgtgatgacaggctcagcctctgtaatggtagtgatcatatttcttgagccaaaaatcagacctcatggcatgtgacaagtttgcatatgtggatgagaacagagtggcagaatatttgacacgggagcagcttgggcagtccagggcacatggcactgcacctgacatccctggcagatcccccacattccgtggttgtcttctgatggggccatatggggctgcagatcatgcctggagccctcgcagctccagggctgcgggttcccagccccagagtgcaggtgctggtgtcagcctgcctggcctggcctggctctgtccagagcactccttgccccagctgtttgtgcagctgtatcagcctcagacctcagcctattcattccaacctgaatgcagaggctgggtctggaggagccacattgcgggcttcatactcctgatctgacaagttttccccccagagcctgcaccaatggcacctctccccattctccctcttaactgggtcctccagggccctcctcacacacccacgtggtcaggcagcagaggcttccccaagatgggcacaccccactctccacacctctctatgcagcatttgtggctacagactgggtccaggggattgtaaaggcatgctcatgttgggttggagggagctcaggatcttcctggaggatatggttcactcccatgagagctcagtatgcctttcctcccctgctgcagcccagagcgggagacagcgaccgacttggatatcaggtactgcgtcctgggaacattgccccccagggtcaactccctccagggtgctctcaggcccaagggagccacatcaccctgctgggcagcccccagaccccagccccagtgttgggggaggccagggagggcccctgtgctccaccaggtggctcgggagctgctgctgtttctgtgcatccatttactcccttcacataagatcatttttatctgggatctctttttcttttttcttcaaaaaccacatcactcaaaatgtggcttccttggctctgcttttaaaaaaaaaaaaaaaagttcttccatttggagaattacctgctgacttcaaagtccagtggcttgagggctacccaaagagggaggaagccagaagttgagtgttcccttggtttggtcacacttttgggctcctccctgactaaggaacaacagactgcagggctggggcaggctgggtgtagggcagggaggggatgaggtcctgctgccccagtcagttgagacccagacctctcaaacctgcctgggggaaggcaaggccaccagaggccacactaagcagatttctaccaactgcacctccccatccccttgcctccatctgagccatcagcttgacaactgcctctgagaacaagcccctgagaatgccttccgcaccccctactcccgccctgctttttccaggaagagaggccccgtggcctatgcttcgcagaaaccatggctgctaaatgccactgtggaggagaacatcatctttgagagtcccttcaacaaacaacggtaaaagcctgtcggagggaggcaggatgtggaggggaggaactgtctctggccagcctgccccagttccgggcccctccatcgatcacccacacccagccatctcactccccaggtgcttacctgcactccagcctctccatatggtgcacctggagaggggccaggtgtgcctgagcattggggcaatccagctcccataggggagagggcaggaatggagggaagggagagagccccgctgccttttctctagctggtgggagggctagctagctctctctgtgagtctccattcgcctggctcctgcactattttccctccaatgataatagttagggctagcatcgactgcgctcttactacataccaggcacagtgccgagctctttgtacacggaatttcctctcatgcttacaacaacctcagtaggtagatattattgttattcccactctacagatgaagaaccaagtttcagaaaggtcccaaggccacccagccagtaagtgaccaagatgggtctcaaatccaaagctgcctaacacctaagtacatgtttgtcaccaacatactctgatgcctccatgaactctggctggcacctgcccaggctaagggctggctggggaagtatgagaggaacaggctgggcaaatatttgaccagccatcatcattactgcctaaaccaaccagcagtggttttccctgcagtgccccaagcacgggttccggctgcagcttttcccactgcacagagatcatgagcgccctttcatcacttactctgcatatttgttcccaaccaattccatccttctagtatttaacctgcccaaacgctgtgtgaagtgctgacctcagctcttttcaagctcacacggtgtttgcttgcacccaagcgggaggcctattaaagccattgctcaccctgggcatagctacccagagactaatgaccctctgcaagtgctcgggccaactctgaccaggctgaccagctgcatcccctgcctctacccacgccaggtacaagatggtcattgaagcctgctctctgcagccagacatcgacatcctgccccatggagaccagacccagattggggaacgggttagtagcagcctctgaggggttttttcaaagccaggacccccaacctaccatgccctgagacactactcaggacaatgggtaactaggaaataggagacattgaaggctgaagagttgcctgcagtaaggtcaaacatgttgttcttgatgatgtcctttgacaggttttcagtcctgcttggagggcaaggtcagcttagtgccctcccaggctggggatcttcttcatttgcaccccaggtatacactgagagcccacacagcactgtgctcagcctggggttgtattgttcctgttcatcctccagatggggtcccctccacaagcttagacgaacaggattctcctgtgactgtcctccttttgtgtgattttaatccctgctgcctctgtctttgtttgtactggtcagatggtccctagcgcctacacaatgaatctttaaagacttggggctcatgctgccctcttctgaatgaattcagtaaacacgtgcaagttccttctctatgcaaggtgagaagcaggcaaagaagtggatagagccaggcctccatcccaaagagctcatagtccagtagggtacaggacagtgtctcctgaatggctgagggcatgatgtgttcctcctctttggtgacagggcatcaacctgtctggtggtcaacgccagcgaatcagtgtggcccgagccctctaccagcacgccaacgttgtcttcttggtgagtgcaagttcccttggggtcctggtctctggctgcctcccaggcctaactgcccacctccacctccccgcaaccccaccatcatccaacaatctccctctccaggagtaaatccctcctgccagagatattgccttatcatcctagtgatagggaaactgaggcaggcaaggatagcacaaatgacccattgcagacttcagatggagctctgcagtagccaatgaggagaggcaagctgtagttataggctgcctgtctgtgggacagcccaacccctcaacacttatgcagcccgactataagaatggctgataacagaatgtgtgctgccacttcccatcttatgcccagtgcagacattgctaattgttcacagcattatttcccatggaacttaactcatcctcagaatccttctcaacacagcactccaggtaaccactagccatcaaacatgagataaaactaggccaggcgcggtggctcacgcctgttattccagcactttgggaggccgaggcaggcggatcacgaggtcgggagatcgagaccatcctggccaacacggtgaaaccccgtctctactaaaaatacaaaaaattagctgggtgcggtggcgggcgcctgtagtcccagctactccggaggctgaggcaggagaatggcgtgaacccgggaggcggagcttgcagcgagccgagatcgcaccactgcactccagcctggggacaaaccgagactttgtctcaaaaaaaaaaaaaaaaaaaagaacgtattcgcaatccttacactacttcatgtcaagttctgttgtgtcaggtgccttgactgacactgaagaattctaagaaccagtccttggcctcaaagatttagaatctgattagggagacagagctcacccagttcaagaggcccagcccggttcaaatccaaactgtgcggcataaactatgagggggccttgtccagggagacaactgtgagggctggagtaatcagggagggcttcctggaggagagcctcaaagggagagtcaattaaacagaaggaaagagggaggccatttgcacagtgagttggaagaaggaagctcaagtctctgattccagctttattccctcccctctccctacaccacacgcacaagcactcctttactaaagacacttcacagtgggaagattcagtctccgttaccgtctgacacacacacagcgttttacaaagcatgggtgcattcgcgatctctcatgagatttaaacaaccctgctagagaaaagtgaagtggacattttatttcagtaaacgtttatgaagcgtctactctgtgccaggcactaaacgtttatgaagcgtctactctgtgccaggcacaggcacaagaagtctcagttcttgggagtgccataatcaggaatggacaaacaatgatcagatctggctttgcgccagtgtcacgggaatagggaggaaggaagggtaggcgtgggggtcaggacaggatgcaggaggaactggtgcttaggtgagcgaaggatgggtgggagttcacaaggcagacaaaaggcagagcagcactccaggcagaggaacagctcaggagaaggcccagacggcaggcttcctgggaacctggaatgcagagtgctgggaaagcacagatgaagcatgagtctagaagggaaagcgagaggttataaagcacctggaacaccagcccacagggtttgactttagagatgatggggagccgttgaaggtccaggagtcaggcagtgaagtgattagatctgtttgagagtgatatctgacaactgccccattttaaatgaggtaaccaaggcccagagaggttgggtgagttgtccaaagccacacagctaactagcttcagtccctagagcagagttgatagaactctaatgggttttatactcattgtcacccctccccaccatgcctttccctaccctctactctcttcctctcccttctgcccaggatgaccccttctcagctctggatatccatctgagtgaccacttaatgcaggccggcatccttgagctgctccgggacgacaagaggacagtggtcttagtgacccacaagctacagtacctgccccatgcagactgggtgagggggaacaagggggtcaggctatagggggcagggctggggaggctgtcaggcatcttggcaggaaccaatccgttgtcttggtagcaactgctgagggccacaaagcataagagaccagcactggatggctttatgcatgctgggcatttcagggagaccctgtacaggccaggggtttggtatcacctagacccacagacactccccatcctggcccgggccccccatggtacactcaaggctggcaccaagaagtctcaggaataatcaagtgctcacttctcaccttctgattcctgcccttttgatgacccatccccgcagtcatggggagtgcccatttggatggaaaagccctcttcccaccctatgaccttcccggggtggatggatgcaccaccccgggaatcatatgggaaatatggaaccaaacaatagcagtagtaatagaaacttcaggctgggcgcaggggctcacacctgtaatcccagcactttgggaggccaggacaagaggatcacttgagcccagaagtttaaggctgctgtgaaccatgatcatgccactgcactccactacagcctgggcgacagagccttgtctctgaaaatttgaaaaaggaaagaaagaaagaaagaaacttcaatattatcagtagagtccaatgttgtgaaacccctcattaactaaatttccatactcttcagtaggtagaaaataattactttttgattcattagaaagcacttaatttttaagatggagatcatgtaattttgaactctaggtcttgcctactcctatataaattctcctctaaacaacagccaaaattgaggccctctttgagcttcaggctggtgccaaatggctctgcttattttccccaaaataaatcttccttccatgtatgatgagaccccctccagtataaagaagacccaaagaaaatcacccaaagaaaaaaggcccaaagataagacccaaagacctaaagatttaaatatatatacagatacagaaggtttgtttctgagtttctgtagtgaccttggcaataccttgtagttcaggacaatcctgaggaacacagaagtgctggcttccttgaggaatcagtgatcaggactctcgagccccttgaaccccagcatagggcgggagggggtgagggcagcaggggtgggtgtctgaattaatgtcaggtctacgtgatggtgtcatcaagtgttccagataaaaagttttattgagccgggcgcggtggctaatgcctgtaatcccagcaccttgggaggccaaggcgggtggattgcttgagcccaggagttcgagaccagcttggggcaacatggtgaaaccctatctctataaaaaaaaaaaaaaaaattagccaggtatggtggcgtgcacctgtggtcccagctactcaggaggctgaggcaggaggatggcttgagccaggaagcagagattgcagtgagctgagatggtgccattgcaccccagcctaggcaacagagtgagaccctgtctcaaaaaaaaaaaaaaaaaaagatttattgattccaaagaggcatggccacacacacttagaccagcaggtgctttgctaagccctgatggaggctgccagacccgccgtcaagaggagctaagggtagtgtacaatgagcccacttagtgtatgacggccgctgccgtgggtggagtccttgtgagtaaccagccagcttgagcaggatgcactaatttgctctgcaaacccagccattgagaaatacgcctcagatgtaccgaactctaggtcctaggagtatgttggttggggtaggttatcaataccagcccacttgcagtggatgagctggtggccatttgtagtgaggaaagggatgtgtcaacctccatcttagactccacaattgagggatgtgaccaccattcctccccagccagcccccaaaccacgtttgttgctgcctttccagatcattgccatgaaggatggcaccatccagagggagggtaccctcaaggacttccagaggtctgaatgccagctctttgagcactggaagaccctcatgaaccgacaggaccaagagctggagaaggtgggtatatccagggatggccaagcagccacccctggatgcaaaggttctgctagaacctgaactcataaaggtcttcctgtccttagtgccccaggaagccccctaaagggcagatgtgggagctgggcatgaactggctcctaccagaggagagacagtacctgtgccaggtgcccagggcagaatcaggtgggcaccttcgccttatcctgaggtagtcagatactatttagttgcaaagtttcagaaaatcaactcaaactggcaaagaaaactaagcaaagaaaacaagagggaattaaggatttattgacccatgaaaccaaaaagtccaggtgtgtcatagctttaagtgtgctggatccaggtagtcagtgtaatcagaaatctgtttctcccatctcttgactctgctcccctcaaattggctcagctcccctcaaattggctccattctcatggtatcagtgagggccaccagcagtcttaggtttacattctcccagctcaacaactctgccagaaaaaaagtgcctctttccccatagttcagcaaaagtcccagggctgagtctcactggtccagtttggtcatgtgcccacccctgaacaaatcactgtggccagcggtgtggaatgtgaggattggcctgtcctgggtcacgtgccactttgggagccagatccacctgaatcacagagactaaaaacaggggaagagtggttccccacagggatatgggggtgctattatctgatgaaggggaaggactaaatcctggcaagatgaatgtgtgtctgtctgcccctccctcaggcagggacaaagtagaaatctgacattggtcatcaccagagtagttaccccttaacttccccttcccccaccaaccatatatcctgaagacattgcccaggccacatctgtcttttaggagactgtcacagagagaaaagccacagagccaccccagggcctatctcgtgccatgtcctcgagggatggccttctgcaggatgaggaagaggaggaaggtacaggcaatgggactgggagtgaaattatggcctgaggtctgatcagccacagagaggctaaggtttggggttctgggtgtggtgcagtagtgtgcctttgattaaatggcttccctctgtgtgcccccgttgtcccctcagtaagtggggataaaatgccctgattcaccctcagagggatggaaatgtgtagccacagagtgggttcttgcggcctgcagaggaggcagctgagagcgaggaggatgacaacctgtcgtccatgctgcaccagcgtgctgagatcccatggcgagcctgcgccaagtacctgtcctccgccggcatcctgctcctgtcgttgctggtcttctcacagctgctcaagcacatggtcctggtggccatcgactactggctggccaagtggaccgacagcgccctgaccctgacccctgcagccaggaactgctccctcagccaggtgtgactggcggcccatggcagaggttgggagtggggatgggggaagggctgagcccatgggcaccctggaactccaaatcactctctgcctgtgaaggagtgcaccctcgaccagactgtctatgccatggtgttcacggtgctctgcagcctgggcattgtgctgtgcctcgtcacgtctgtcactgtggagtggacagggctgaaggtggccaagagactgcaccgcagcctgctaaaccggatcatcctagcccccatgaggtacccgtctcccctggccaggctgggactgtgagcaagtcactgttctctgagccttagtcttcccatctataaaatggggatatacaacctgtcacaagcttgtgggggtgactcaaggagacagtgtgtgtaaaagtgccctccttgtgcaagaagcagggagaaactggcatttactcagccagatactgtgataggcattgtgtgtggttagctcatttaattgttaccatggccctttaaagtgagcgtctgcacatccaagtaaagattgttttctcctccctaagtgggtgtaatttgcccatccccacccatgagttcagctccctgccctcccctcactctctctccctcagccagcctcaggttttgacactgggggaacaggtagctgttctattaataatttcctgtaatgggatggataaaaatctcaaaggccacttgatgtcaaagaggtttaaagttgtccctgcccaattggttggccaacttggcttaaaaacacaacaggcaaacagattttctggccccttgtcgaggctagacctcacaatctaactgcactttttactttccagcctcatgagttttctgtggcccacagatatggcctccaagtttatttacttttactctctatttgccccagctctgtagttctgaaactccctggttggggttgggctgactctgggtcagccagccggcaggctgtccccagggccctgttcctcttggcaggttgtccctctggagaggactctgtgtcccaggaggacagctgctgagtcaggccgagccggcagctgagaaaggcggcagtcgtcagatgggcttgagaaactgaaaggctaacgaaaggccagcgcccctttgggcagctgcaggaattcacggggatacaggccagatgtctacaaattggcagaggatgccagacccatgaatgactccagagacacttacatgaaataattaactatctcattcagtaaacaggaagtaaatcaatggacaaatgagtaactcttcctctggctgcctcttaggttttttgagaccacgccccttgggagcatcctgaacagattttcatctgactgtaacaccatcgaccaggtacagaggaccgtgccacactatccccccttccagagacacctcggacccctgggggcttctcctgtctgaggctgggttccccagatcaggtgatcacagccctctgggaagaagccagtgtccccgatccgattataatgctgcttcagggctggggcctccctcgtgggagcctcacagtaaggctgagggaaaccagatccctttagcttccacctgagatcccactggctttctctagtaaagttccagcatattctgaaccaaggtggctgattgtatggagaatattcattttgattcagcctgtgttctttatttaccattgtaccagatggtgtgaaaacaaaatcttgattcctacctcagggagtttaccttgtagctggagagatgagatacgtgcctataataaagggagagcaaggccgggctcagtggctcactcctgtaaccccagcactttgggaggcggaggcaggcggatcacttgaggccaggtgttcaagaccagcctgatggccaacatgatgaaaccccttctctattaaaaatacaaaaattagccaggtgtggtggcaggtgcctgtaatcccaactacttgggaagctgaggcaggagaatcatttgaacccaaggggcagaggctgccgtgaaccgagattacgctgctgcactcaagtctgggcaacagtgagactcagtctcaaaaaaataaaggatcaaaaaataaagtgagagcaaaacatggcggccagtagcactctaaacacagtcaataccaaaattcacctcactctctccccctcgtctccctcagcacatcccatccacgctggagtgcctgagccgctccaccctgctctgtgtctcagccctggccgtcatctcctatgtcacacctgtgttcctcgtggccctcttgcccctggccatcgtgtgctacttcatccagaagtacttccgggtggcgtccaggtgatggcctcaggggtgaggggtgggaggtgctttgcaatgtgcagtttggtgtacttgctagactcatcgttatgagagtaatagggtcgtgttccctccaaaaaataaaaacaaaaaacagaaatgaaggaaatagaaatatccacatcttattccaccgccctaatataatagtctgccaacacacgcacacactgaggttgacatctgaattatttccttgggcgatatggtcaggactggaattgctaggtcatgataaatgcacattttatgcccttcattcattttgccaacatgcttcccaggagggttgcatcattctagtggtcaggctgattgctgatgcatgaaatcggcgggcacctgattcaagcagtgttatgataacacctcccagcccacgtgagtccagagtgtagctgtaagccttgacttgagggagcctctcacagccattctcatggatcacatttgccctcatgagctttggatccatgcacgcctctttcctcctcaaaattttctaagaatgttctctagggagttctttctgggagtgattctcccagattcatagaaactcatagattcaaaaaattgtaggaaaaaatttaaagaacgtctaggccagtgtttctcaaactgccaattacagcccatcagtgggtcatgaaatcaatatcatggatcacaaccagcatttttttaaaaatgaaaaaaacatcagactgtattcatagagtaaagcaagctttgcttcatgaaacctttgtgttggtcatggaggtgtgtgagtactgatttgtgagataaaatatatttctgactgcaggttgtggtcagaaaggttaagtacctttcccaagtgcacatagttggctagaaactagagttgagatacttattagcaataataaaatttagatgcattttggacacaattacctgccccaaaggatcaacatttgtataaatggctttttgcttggatgatccagaatggcccgacacccacacgaacaacatagctttttgacactcaaaaaattcaaagtgctgcacaagctgttctacaaagttcatttcttctgccagagaaacagcccagtctctgtggcacccagtctgaccctggagatggtttatcagggaaatcaacttcctgcatcccaaactggcctccctggcactgatgtgcttgtcgaggtgcagctttggggagcaggaggcaattctgttgccatggaaacctctggccttaccccgagacgaaacctatcatttcagcacatcactggccagggtctaaagagctccttgatggggtaagcggaagacggggttgaacgctttgagtttggtcttctgttcctttggccagctgtctcaaggttcagattgttcacctgtaaaatggaactagcactgcctgcccagccttagctcagctccaggctgtgcagcagaagtacagggacagatggcgacctggggttgacaatgcccaggacagcagtaattgtgccccacatcaggctgtgtctaagcattgtacataaacgatctcattcagtgctcacaaaagctcaatgggctggtggcattgtcttcccccttcacggggtaagaagctgaggcctagagaggtaaggccattcacccacacagcggtagcaggtggagctaggcttcaggcccaggccgagccctgagcctgccctcttaactgttccactctgttccccgccacagggacctgcagcagctggatgacaccacccagcttccacttctctcacactttgccgaaaccgtagaaggactcaccaccatccgggccttcaggtacgagtccacattcccccaaggtaggagtggaacaggggtggggccagggggcacaggccatgagatttgattctcaggactccacttgggaaggccaaggacacgttctctctcaagctgcctcaggtcccaaggcccaagggatatccaccagcagggacaggccaggtgggctcccactgaatgttctagagaggaaaattccagctctgtagacaagcccaggacctctgtgaggcagagcatgaaaagagacaaagctgggacaagtcttcatgtatcaacgctagaaagggccttaggtgcgggccaccctaagcccttcttttattaaggagcccctgtgtgccaaacactatgctgagtactgtacaggccaatcccactcattctgcactgcaaccctcggtgctgagaatggtcatttccattgcacagacaaggaaactgaggcacagagacgttctataacctctctgtgtaaggtgccacaaagcccagacttgaacctatttgttcatgcaacaaacatttactaagccccgactatgtgctaagccccatgccaggcactaaaaagatgagtcaaataagccgctgccctgcaggcgtttacagcccagactttgagcaggccaggataaatccacgtgacaagtattctgaaaaaagcggattcaagggctgtgggagcatagaagagagacagtccgggaaggtttttgtaccagaggtgtcatcagaactaggactcaaaggaggggcaggagttcaccaggctgaggaattcctgaaaacttcagtgcccctgccatcgtctcactaccctgagtggtgatgttggggtggacaggagcatctgaggttgcctggggaatgagggaagctgttgtttcccactccccaagagtctgtctgatctccagaggcatctctcttccagtcaggcaggccagagacccctgacacacaaagttgggctcttttctcatcttcatccagagagtgataataggttatttttagggtggcacagctgcacgaagtatgacagtaaccatgagacaccaagcactgtgtccaggagtaaccatagggcacaaggaccagccaagggccagagaggcttacatctcctccccccaacccctgaagtccagcttcagccctggagaggtatccaggcccctctgcccaccctggagcacctagggccagtggaaatccacctcttagggatcttgtctaagtaaagaagagcagagcaaagctctgccctggccttggcgctgctccctggacatcccttgcccctggacaagcctatgctgtgtcttccacaaagaagcttgctggggactggattatgactctagagtctcctcccagcctcctcttctcaagcctgaacttctcccgttccttcaacttccaggtccctcgacattactgagcctagcctttgctctaagttttggtgatttccctctctcaattggtgtctcagagggccctggggtagagagatggtgactcttctagagtgggccacagccccttgtgtgcagatcccagcttcctgtaaacagcctcagatcaggccaaacctgtggtcagccagagccactgctacccagtgaggtcttccacaccctactgacacggtgaatgatttttaaatttgaatgaaaggctttttaatcaaccccatacacatttaatgcattggctttaatccagcagcctgttgagagctattagcacttattgattgcccacttactgtatgccaggcaccgtgctaagtgttgtatgtgcattattacatttaatcctcacaaggaccacataacataggtacgaatcgccacattctccagatgcagaagcgagacccagagaggctgggtaatcaatccaaggtcacacagactgcgggggctggcgctgagcttggaacccaggtttgcctgaccttctgggctttcctaagagatcttattttttcccaaaagagtttcaagagtgcccagcactgggctcagtggcgggctcggaggttgttttcgttcatgtaggaactatcacttccccatttttttcataagaaaactgagtctcagtcctgatacacagccaggaagttgtgatgttcaggctccaacctgggtttacatggctccgaggctggggctcttttctagtcctcagacacactgtcgcacgcctgtggcagaagctcccatctcacacttgccgaccctcaactcacacagtcctgagacccacatacgctgagcgcctcacactcctataacacgcacatgccctgatgcacacacattttcaacacgcacttactctacccttcaggcatggtttcacactcactgcagacacgtcaccctcccacacgtctccaccctgggggtgtgcagtagcatgctctctcccacctcagaacctcccttcagtcccctcagacacatgccctctctccacgcagagacaatcaaagctgaactaacaccttccagggtgaaaagcaaatgcccagtaaggtacgtcttgggtgcctccgtgtcccctgagtttggtcctatcaaaccagcgatgatgaggcagcttttctttcgttccttcctccatcatcaaacaagtgctcctgcatctcctctgggccgggcctacgtcagcaaggtctgagggaagcggccaaggagagtgatgacggcagcccaggttgatcagagaaaggaggcaggtccatgcgcagtaactcagggaaaacatgatgaggacctaaggatgagaaagaagcctccagagttccctgtgcagagagattccatcaatttcagagggtcaggggagtgccatgcattcatccaacaaatatttattgatagtgccaggtgctggggtatattggtgaataaaacatcttcatggaatttgcagtctattgagggagatgattataaatagctagagaaatgcatgtacagcagatactgtggagcaaacaggttgcagacaataataggggaaacctactttatagtaaggtagtagccaggaagagcctctctgaggaggcagcatttaaggcaagccctgaaggttgagttgagccagccttatgaagagcaagggcaaaagccttccaggaaaagggaatagtgtgtgcaaaggccctggggtagggaagactttagtattgtcacagagcttttaaaaagctgagtggctgcagcatagtgtgtggggtgtttgtggcaggaattaggttggcaggagggggttcttcatcctataagcagtggaaggtcattaatattcttttttatttgtttttttttttttttttttttttttttttgaggcagagtctcactttgtcacccaggctggagtgcagtgaggtgatcttggctcactgcaacctccacctcccgggttcaagcaattatcctggcttcctcagcctcccaagtagctgggattacaggtgtgcaccaccatgcccagctactaatttttgtattattagtagagacagaattccaccatgttggccaggctggtcttgaactcttgacctcaggtgatccgcccgcctcagcctcccaaagtgctgggattacaggggtgagtcaccgcatccggccggagatcattaatattctaaacagtgggggagaggacacagtttgcgatttagatagattaagccagccactgtgtggagcatggactgtagggagacagcaggtagacgtattcaggaagctgatgcagtagtccaggtgagagtttgtggtgggcaggaagcaggatagagggggagggaggcaaggactcttttagagagagacataagaggacttgccaaggggctgaatgtgaatccaggtgattcctgggtgagaaactgggtaaagggaggtgccccttattataatgggaaagacctagagaaaatggatcttggggtgaaaacaagagtttggaggaggtggggattctggacaggtttgaataagcagaaaggagtggggtggacattccagagagggatagcttacatgaagtggccacggtggcatgtctggggactggaggggccctggagcctccctctgcaggtagggagactcctaggagctatgtggaccaacactgttcccttaggagcttctcatcctccctccaggtatgaggcccggttccagcagaagcttctcgaatacacagactccaacaacattgcttccctcttcctcacagctgccaacagatggctggaagtccgaatggcaagtgctattcccctctaccctggcctctgataggagggtggggccagagcaagagcacacaggtacctggggatgaaagagaggataggataccagatcgtgtggacaccaagccttcctgcttcccccagccctggtggtcctcctagtgtctagcctgtgctccttttccccatatcactgcctggaggcttgtgtatctgaggtgtgtgccagtggcaagaacagttgtggtgaatgtgtatctgcagtgggtcatatgacacccacattgtgtgtgtttgtgggccagctgaggcgtgcatgttaaagggtgtgcaggggctagggggtaggggagcatgagcttgtgggacatgttggctcctggggctccagccttcgcagcccttgtgtgtgtctggtgacgtgtgcatgagttgcagggctggagtggaggcctggctgagctgctctctgccccgaaaaggagtgaggtagaacaggggcctgtggctctaacccctgagcgcccaggtcagctcctctccctccccaggagtacatcggtgcatgtgtggtgctcatcgcagcggtgacctccatctccaactccctgcacagggagctctctgctggcctggtgggcctgggccttacctacgccctaatggtgagcggcagtgggctagggcagaggaggggtcagacaccagcactcccggagcaccttcgtcactggagacatgagacactcccaggccttaccccaatttcatttgcatctgatgccagagggacagtgcgggcaggaaggctgaccagcaggccccagggcccaggccccagacaggtggaggttggggagccacatgactgaccctccctgtgcctccagggagggctgctctgagcaggcagtggatggcagcaaaaggaatctggggccctggcccctctccagccttaagaagagccattctggtggctgaggacagaactaagcgaccatggagtgtgcgccactggcttgctccccacaggtctccaactacctcaactggatggtgaggaacctggcagacatggagctccagctgggggctgtgaagcgcatccatgggctcctgaaaaccgaggcagagagctacgaggggctcctgggtgagaggctcagggagaggggtggggaagagtccaaggaggagtgtgtctgggttgggggccacaagggagcctggggatggggtggcactttcggatactagctgtggcccatgcctggtggctgagcccagcccggcccccagcaccatcgctgatcccaaagaactggccagaccaagggaagatccagatccagaacctgagcgtgcgctacgacagctccctgaagccggtgctgaagcacgtcaatgccctcatcgcccctggacagaaggtcagagcacgggcccaacccaatgctgcaggacaggcgtgagcaggggatggggcatgcacggagctggatggcttcgcagtcacctcgtggccctccagggccgaggcctctcactattcagacatcgcagtctcctgccctgggcctgtgggggcccatctttcctctccttctattgccttcccccagtgctgccctcaggccttgtcttctcactcatccaccaaggagaccgacactctggactcccccagctcacacgggctttgtcagggcctccctctctgcgaatggtcaggggctttccctagggcactgccccgagcttcagggcagggacctgggggcagacagcgaggccacccttgtattgagggtgagcccctgcctatggccctggcccagctctcctctcgtttcccactctgtctctttgtctctgtctcactttgctgtggctgtccatgtcattctctgaccttgggatgtacctctgtccctgcctctctcatccttctatgtcactatctgtctccgtattgtaatttctgttggtacccaagtgccaggaagcaacgggatcagaggtggctccattgtagggcggggcacacagacacatccatgcataccactctcagctgcccctgtgtcctcctgccacacccatgcccatagagacacaccactgccccccagctctccttcagccaagtacccggcacacccagacccacaccaaggcccaggcaaatggacatccatgcctgcacttgcgtgccggtccctgtgtaagccctctctggacccactgcaggaaacaagcccaaacctgtggtgtccaaagagaaactagtcagaaaaccaggccaaaaagataccctgtgacctcccacacctgcacacacacccagagctagcatagaggctattcccagcagccccagagtcccagtggcggtgcctgcttctctctttccagatcgggatctgcggccgcaccggcagtgggaagtcctccttctctcttgccttcttccgcatggtggacacgttcgaaggtgagttgtaaggcgggcaccccacgtgtacccacagccaccagatgaggcctcagccctggcacgtggtcagacatgacaggaggcccagcagtcaccgccttcccctgcaccctcactgggacccatgcagggcacatcatcattgatggcattgacatcgccaaactgccgctgcacaccctgcgctcacgcctctccatcatcctgcaggaccccgtcctcttcagcggcaccatccggtgagccccaccacccctcaggcccacccagccccaggccggctcagttccatcagatctggagcacaaagaggagggggttgggggagaccaggatcccagaggtgtttcctgctcatgcccttctccatcccatcaggcccaggcagcctctggaaggggatcccccacccatgggtctaagatgctgtcccccacccactgccaccacctcggtgcttctcccagccagacctccaactcagtctgctctcgctcactgccctctttgccgcctggggatgcaggcaggaccctgctccctccctactggggctttctgtgccacttccagatttaacctggaccctgagaggaagtgctcagatagcacactgtgggaggccctggaaatcgcccagctgaagctggtggtgaaggcactgccaggaggcctcggtaactactcctggctatgcagctgggttggttgggcactcaaggaccctgtaaggatggcagacagaagcccgtgtctcaggtttgccccaagtttggagtctgaagcctggcaggaccatttagtcctacttctcactatacgggggcccagagaggtcaggtgtcttgccccaggtcacacaactggtcagttcagggtctggctcctcctgcagggtacagcgggtacagtcagggatccttgtgagacagagattgcgagtcccccatgccaagggggcatcttcagccctgccctgccccatccacctgcatgcccagttctgccttaggggaggagaagatggactgggcaatcatagacacgggtcactcatcaaggccaccggtgattggcaaagccttggtatatttgctgcagctcctggagcattgggggtggccaagccttggtttcaatgaatcaccctaccaaggccctacatacacactcagtgcacccctcagtgcacacgccccctcccagaactgcccagggccacagcagcacacacctccaggggtgcccttctcgttgcagtccttgcagacggcctccacattgttgtgtcaggtgcaccagccctgcacacgcctgtgctcttggacacacacccacctatttgcccccatgcacacattttccaacagccccccaagccatcccatctgctccactcacagcacaagattaactcagtcctacttcatctccccgggctgttttcagatgccatcatcacagaaggcggggagaatttcagccagggacagaggcagctgttctgcctggcccgggccttcgtgaggaagaccagcatcttcatcatggacgaggccacggcttccattgacatggccacggttggtcctgggcccctccatgggaccatggtcttggaaagggtttagtgggatgctagggagaaatttgcacgaagtagtcctgaggctcaagttgcctctaacatcaaatgctatgtgttgcagaaaatgaaaagagctggggggaccctgactctgtctagtcttagggaatgttacacacacacacgcacacacaaaaacactatgcaaacacacacataagctgcacacacagacccacacagacttcacactgtcacctatcacaacagcacacacacagccacaaccacaacctacatacacacacagagctgagctcccaacaggctgagtccagtccctgagtgccgggaacctgttcagtcctgtggggtgggggtgggactaggatcggggtcagatgggagctgagccacagacctgggctccacatcccccaagccaggccagaccccatccactgggcaggtgagccaacagctgttgcccccacttggcaggaaaacatcctccaaaaggtggtgatgacagccttcgcagaccgcactgtggtcaccatcgcggtaaggggcccattgatggggtgcagagggacacccagggacaggactggcctgttgtggccgtcatcagtgcacagcccctgggcttgcctggtcccagtaatcaagaaagaaccctgaagcaggcagttcagggcaaggggcctggagggcatgcagggagcctgggttgcaggatttggggtggggggttttgcccctgtgcttccctcagacctcccctctccttctccaggttccaaggcctgcccctgtcccaaggccttatatgttaggctggcgttacttctccataggaagtgggggaggggttgtggagggtctctgagccttgaagcctggaggtggggtagagttgggacttggagaggagagaagggtggtattagcagatggagagcttgtagtcacatccaccccaggaaagtgcagtccccacagtgacaggacattctggccacatgcctcatcctcctcctccaagccgcaggagggccaccctcagctgtggcccccaccgcgggtggtattcccaccatcctgacccgccccctcctgccctgcccagcatcgagtgcacaccatcctgagtgcagacctggtgatcgtcctgaagcggggtgccatccttgagttcgataagccagagaagctgctcagccggaaggacagcgtcttcgcctccttcgtccgtgcagacaagtgacctgccagagcccaagtgccatcccacattcggaccctgcccatacccctgcctgggttttctaac

SEQ ID NO: 15323 - DNA, 83933 bp, Homo sapiens
gctgcaagggacagaggcgcggcaggcgcgcggagccagcggagccagctgagcccgagcccagcccgcgcccgcgccgccatgcccctggccttctgcggcagcgagaaccactcggccgcctaccgggtggaccagggggtcctcaacaacggctgctttgtggacgcgctcaacgtggtgccgcacgtcttcctactcttcatcaccttccccatcctcttcattggtgagtgcgcgcagcgagccgcggaggaggggacgggagagcagggagggaggaggaggcgctgcgcgccgcaccgctcggcgtccccttccggcccgcgaccgccgtccgcctcgttcccggggtcccctgccctgtgtcctgcccgccggtccccgcactcgcacaccagctcatcccttcactcccccggtgcccccgatcccgcgccaaacacagcggacgtttgtgacccatgggatcaccaagttttgcttctgcagggccaagagctgggatggggaaaagggaaagaggaggtctcagcacgcagtgggaaactggagaggggtcgggcctcaccctccgtggcgcagcttagggagccgggtcacccctcccgcaaggcagcctccctgtcagccgcagctgggcctagggaagagggaagcctgtgctttggagtctgggatggaggcccagctaacccctatgctttcaccgggctgagccgcgcagtggtccgtgatctctgacagtcccaggcccgcgccctgggcgaggagaggcgagagctagggacttggattcccttcccccgccaccccacccgggcatgtgtctccagagcgcaacttctcaggctctgcgcaaagtagctccgactcgccgacgcagcgaccccggcgcccttgcttgcaaagttgggcgccacggccgggacaatcgtgcgtgcctctccactgaggtcccccccatctctctccaagaccttgactcttccagaccagtcaagtctatcaactcatagggtgtcccctgcatccccaaaacgtgttcattcactttaagaaaacaagcaaatcttaaaattcatatacagctttggggaagaaaggaaagattgtcacaaaattagatttacaagaggttgctgcagaagcagagttgctagttattaacaaagacagttagatagaaatagaaataaaacatacaaaatatgtgctcatatgtgcatcaaaaatcaaaaaagaacagcatttacacttctgttctcagccaaacggtttattaacctgatgacttgtcacacaagaagttagtatgtataatggggtaccttggcagggcacagtggcttacatctgtaatctcagcattttggtgggctgtgacaggaagactgcttgagtccaggagttcgagaccagcctgggcaacatagtgagaccccccccgccctttctacaaaaaattaaaaattagctgagcatggtgatgtgcgcctgtagtcccagctactcaggaggctgaggcgggaggatcacttgagcctaggagatcaaggctgtagtgagccgtgatcgtggcactgcactccagcagaggcaacagagcaagaccctgtctcagtaaaaaggtgtggtgggggaggtaccagcataggaccaggctgaatgagttggacgtttagtttgtgtgtaccagccttggggatcctcatgtgtaggtgtcaccctcaccatggacccaatgcccaagcacctttctggggttcatgcaccctcttcctcctccaagtgggcaggcatcctgcctctgactgtctctccctgcaggatggggaagtcagagctccaaggtgcacatccaccacagcacatggcttcatttccctgggcacaacctgcggtggatcctgaccttcatgctgctcttcgtcctggtgtgtgagattgcagagggcatcctgtctgatgggtgagtgactgtctgaggactcaggaaagtgaatctgctccagggtacttcctgaaaggcccaaggagatcctagctcacctatattccacaagcccatgtcttttgttactacatccagcagctcagtgtcttctatgtgccaacctctctgagctgggcactggacgcaagtgagtcccaggccctgccatcagtccaggagagcagagggaacacggacctgcatgccaagtcccagtgaaataatgctagagcctattagaatgccacaactccagtgaaaaatgtctggcctcttctacaacctgccggagttaccttcttggaaaaaaaaaaaaatctaaccatgccacccactcttgcataagacctttccttggttctcagctgttttgaagatgtggtctcagatcctcagcccaccattcaaggtcttcacagtcagccccacctatctctggcctcattccccatgcccaccttccgtttgggcctcacagcacactcctcacacctctgctacagcacagatcacactgtatgttaaagtttatgtctatttgcaaaactgtcttcagagtcagaaaggcctaagagttagaatctgagtcttgttcatctttgtgttcacagtgcaaggcatgtgataaacataaacattattcagtccataaacatttattgggtccttaggagaatgaatgaaaccatgttacaaataagtactctgggaggtgagaggaaggcagaattgggcaagctccatggttgagagggctttggagcggagtctggaagggtgactaggcttcagacacacagaggaggaaggagagagagaactggtggtgcctgagggaagggaaaaggcaccaaagagaaaagcaggtagggctagggagcagcgcaggggctggagcattaaacacaggctggggagcgatggaggctgaggctgggaacccaggttggggcatctcaggaggactgtgaatcccagcctgcatgtttgggtcggatttggtcagcagtttggaacagaagagagatgtcatcagcataacacttttaggtgggaacctgaggtgttcagcgcaggctggaggcagggagaatctagaggtataatagaagcaggacttagcattgactgcagtagtctaggtgagcaataactgcagacagaaatggtgtgtcagcagtcagggacagaagaggagcgggagcagccatctcactaaggaagaatccagtaaccagcaaggatgagagactgccaggagagggagtggtggaggagagggatatttggcttgagtatctgaggtccagcgccccctgagctggaatcagattatacccagactgcactcctgcagtgctgcctggctcctgtagttggatggcaggggataggctccctcatcctccctcccgttccccaccttcccttccccaatgtccctgcatcctggcttcagcagtgatctctaaaatacctgcttgacttggaggcagcagctctgcctgcttattaaagtccctagaccagcaagaagaccagaaggcatactgctacacaagcacgtgacaagtccgcctccacccccacccctacaccccttccaaagtagcacaaatgccacagtgagccctcagatgggaaatactcaccagatggtgacagagaaagacacctccgcccttggagaaggaagacctgggtcttcagtgagcactgctgctgtgtaccagctatgggactttgcacaagtcattcaggctttctgggcctcataagcatttataaacatacgataaaacattttagttgccaacttaaaaatgtgtgagaaagtataaggtgtttcaaaattatttcaaggagtaaagaggcaagagttttgaagatccctgggcagggtgttggctgttcccagtgtggccattcatgactgctctctggccttatgaaacaagcatcatagtccctggcttgcctgcttcatggggctgtggagggtgaaattcgagcatggacagggtgcagagcccggagtggcagagcactgggtagactgtgtattcccagaatgtgggaaactggaatgaatcggtccagggatgccctcctgctggctgtcagcagcccctcctgtgtgtggctgtactgcttcagctcagtgcaaagggccatctcctccccagggcacagatcagctcaagctgagtaattgtcatctggtctttgtgagctcctacccccaggcctgagtgaggggcaggaaaagagcagacaggagaagtcacagacccttgtgatacctccagtctaatccagcctgggttttcagagctgtctggaaatttagggggcaggtgggagggggctgattaaggcagccctgatttgatttagagtgagcctcatttagtgactaattaagccatcttaaacctgtagggcttcccctcttcctttgggtattatttctttctgtgatgttctgaattcagaacaatcaaaacagtataagttagtgaagaagatattttttaataactacaatattttcccagaccaccatacactggataaagcctgtatataaaactttacctaatttcttaactaattgaatgtgtattatttaacaaagcagctaaaaactattctatgaagccatgtcatgaaatatttagttcaattatggttaatcctcatcttatttcgtcttataaaattttaacatttctacctcctattgcaaaaaaaagcatttatatcagcatataataaaacatgtctagatgtcagcttaaaaatgtgtgagagagtagagggtgtttcaaaattatttcaaggagtaaagaggcaagagttttgaagatccccaggaagggtgttggctgtgcccagtgttgccattcatgactgctctctggccttgtctgtcttgtaccttctatattagtttgaagaccttttttggagaatattcactaaagaatatcaatatctaccatttcattaaaaaagaaatgtggagtttgccttttcaagttggtttgatgcttattgatgttttcagggacccagcctcttcccatctttccataccatcctgtgtgtgtgtgtcagcctatcttccccatggtcacaaggtggctgcctagctccgggtattgcttagcatgagcagagagggcatgctgccgacatgcctctcctttatgacagagatcattctttctttgacatctcactggccagaatacgtggaccaacactggcaaaggagtatggaattgcatggctgcttaaaccaatcaccatccattccctggggctgggtatattgctgctggagcaaacctgtggtcctcctggcacagaataaggggaagatactctttggtggacagcccacattgcctctacacttgcacctcagtcccaccagacccactgaggtcacaggatagctctcctcatgtccttcctccttctctgttgaactcttatgtatccttcaaagtccagcctggtgccacctcctctgggaagctgtccttggttgcccaccccctcctttgtgctctctcagtctctgtccatcggcagtatcacttccctagcctgctgactccaacagttagctctgagcatggcagccccctccataccatcagcttctcaagggcagggacccttggcacactggatagaagtagcctggtgggcaacagcagcactgaggcagcaagctgtagcaggccatctgggaatggagtgggtaccacagggctggagcagaaagggcaggctgggcagatctgataaagtggctggaggccacatagcctgggcctttcgttccaggctgagcagagtgggttttgctgtctgcaggagggagctgtggaagggcatgatcacgaccaactaaggtgaccctcctcaccaggcccagggaagactgaggcctggaaggaggctctggctgcctctgggtcttacccccaggccacagtccacccacttagaggcctctgtgagttaaggtggagagactatgagctggtattgactgctccattccccatcccgagagaggagacaaaatcagtgaccttggaaatgcctcttcgtgcctcagtttcctcaccccataaaatgggagactaagagtacccactcgatggggtttaatgaagattaaatgggttaacatatatcgcatgcttagaacagtgcctggcacagagtaaatgctccataaatactgactctcatcagtttgttatcacagcctctggggagggcgccagtgctgacttatgctgttcgtgttaaatggggctgtcactgggtgagttgtggcatacaggcccctgcactgttcaagagaccccagcaacccttgtgcttagggctcagcacatagtaaggcctccagatcatatacccagctctactccatgtactggcagctctgcccagcccataccccaaatacgcccattaactaaagggccctgcagcctataaagtgatgctataaaggttcagtgttcagcctttgaaattcaaggcctgggctgctctattgcagtacttagcatgtccccatcctgtctgtttctctctcccatctcagggtgaccgaatcccaccatctgcacctgtacatgccagccgggatggcgttcatggctgctgtcacctccgtggtctactatcacaacatcgagacttccaacttccccaagctgctaattggtaggtgaggtgtaggagggaggggcagtaccttcattcatttcttcagataatgtttactgaggactcattatgtgccagctattgctctaaacagtagagatttggaatagaaaaagaaaaaaatccctgccttcatggagcttacagtctggtgaaggaggatagacaggcaaagacagtgaataaacaagcaaacaaataggtggtggggatgctatgaagaaaatcaagctgagtaaggggtaggggcaatgacaatgttgctatctacacaggatggtcagggaagggctgtggtaactgtgggcatgcagatatttgggggaaggtattccctgcaaggggagtgacaagtgcaaagtcctctgatagggatagatttggcaaagatgtcactgtgggcaaagccaaatgagcaaggggaagagtgggaggtgagggcaggcgtcaggagaggagcgagcaagagtcccaggctctgggcctgagagcctgggtgaactgtggcatcaataactgatgtgacagaggagggggaggtgggctgtggtggggataaagttttctactgggggcatatcgagtttgagatgtcacagagacagccaactcaagtgtcaagttgggctttcatggggaggtcaggacaggagctacactttcaggaggtgggccttgtagatgacatctaaagcttgagcctggggctggctgccgtggctcacacctgtaaccccagcactttgggaggccgaggtgggcggatcacccgaggtcaggagtttgagaccagcctgaccaacatggagaaacccccacctctactaaaaatagaaaaattagctgggcatggtggcacgcatcggtggtcccaggtactcaggaggctgaggcagtcaaatctcttgaacccaggaggtggagattgtagtgagctgagatcgcgccactgcagtccagcctgggtgacagagcaagactccatctagaaggaaggaaggaaggaaggaaggagggagggagggaagggagggagggaggagggagggagaagaaagcttgagcctggatgaggtcacctggggagagaagagaaaggctctgggaccagagcttgaggtttgctaacatttagagagactcgggaaggactgcccacttagagcttctgagatgttaaatactgcaggactggggtcccaggcagaagcaacaggatgatggttggtgtttactgagcatgtgccatggggcaggctccatgccatgttccttacattcattgtcccacaggctaattcccccagcctccttattggtattgttaatatccccattttccagtgtggaccctgaaactgagaggttaaaaataataacagtaaatactcactttgtacttactgtatgccaggccccatcctacctatgtgatatattaattcatttaatccttgcaacaactctatgaggtaggtaccattattattttccctttacatatcagaaaactgaggctcagaggttaaataactggcactagtctagctcgtcaaggggcacagccgggagtctagcatctgtgcaatctcctaatcatttctgagactgcgtgtctaagggccctcagacttcgtccttggggtaaaggtatcaatccgcaggtctgcctctgtgttggggttcagcctgtgtgtctaaggctggggctgtacatctggcagttagactttgttcacactatgtccttaagtcagactgatttttaggtatcacagcatcgaattgacatttggagtctggcacactctgtgctaagccagtgacatcatggtgttgtcagggagtacagggtgtttcttgcactagtcacaggtctgcctttctgtagaaggtgggatctgagctccattaggattatccaggtgatccccctacccctagcccaggggcccccacatgagtatgaatgggagctgggggaagcaggttgagaggggagatgttaaatacaggcttcagagagccaccctgcttccatttctgaagtagctccttgtctgtagagaacccttcattaaccagggcctggctgaccagtgtcctctggaaacaccctgtctggacatctgaggagttcattttctcattctccagcaaacacataatgttctctctttaaagcacaagttatcacccgtggatggatttgtccttttctaaggaacaaagactaactccctccattccccttgttggagttatctccccttgaaaggacactccacagagccagaaattctagaacagggaaaagtggaggggacgtgcctgtgaactgcagggacagaaggaaatgggtattgggagaatggccagccctccaaggggctgatgtctggcctgggtatggagtcccacagaaaggggacctgtgatgcagcttacattgtcccgtgagggaaccatgatcctggaacccagatgaggccaaggaaatgttctctgaaaaagtcatatttgagctgagaactgaaggaactaactgggagaagggaggaaagagtgcttcaggcagaggaaacagcatgtgcaaaggccccaaggcagaaggaacaaaacacattagaaaattcagaagaagaagagtggcgtgggtgcaaagtggaggggagctggactttgggttttgtttgcttgtgcccaggctggagtgcagtggcaccaccttgggtcactacaacctccgcttcctgggttcaagcggattcttgtgcctcagcctgctgagtagctgggaatacaggcgtgtaccaccacactcagataattttttgtatttttagaagagttgggatttcaccctgttgaccatgctggtcttgaactcctggccttaagtgatcaggtctcaacttcccaaagtgttgggattacagccgtgagccaccgcacccacctggaaggtcataccacagatgtttgcctttatcccaacagcaatgggaagttgtgtgtgtgtgtgtgtgtgtgtgtgtgtgtgtgtgtgtgtgtggtttaacatgtttaacataaaatttatcatcttaactgtttttaagtatagtgttctgtggcattaagtatattcacagccgggcatggtggctcatgcctgtaatcccagcaccttggcaggccaaggcaggtgaattgcttgagctcagaagttcgagaccagcctggccaacatgccaaaaccccgtctctacaaaaaacataaaaattagctgggcgtggtaatgtacacctgtagttccagctacttgggaggctgaggtgggagtatcatgggaggctgaggagagaggatcagttgagcctggaaagtggaggctacagtgagccaagattgtgccactgcactccagccaagattgtgccactgcactccagcctggacaacagagtgagaccctgtctcaaaaaaagaaaaaaaaagtatattcacagtgctgtgtagccatcaccactatccatctccagaactttttcatcttcccaggttgaaactctgtactcattaaatgataactccccatttctccctccttacagcccctgacgaccaccattctactttctatctatgaatttgagcactctaggtacctcatctaagcggcatcatgcactgtctttttttttttttttttttttgagatggagtcttgctctgttgcccaggttggagtgcagtggtgcaatctcggctcaccgcaacctctgcttctctggttcaagcgattctcctgcctcagcctcctgagtaactgggactataggtacctgccaccacgcctggctaatttttgtatttttagtagagacggggtttcaccatattggctaggctggtctcaaactcctgatcttgtgatctgcccacctcggcctcccaaagtgctcggattacaggcgagagccaccttgcctggcctatttgtctttttatgacttgcttatttcactgagcataatgtcctcaaggttcatccatgttgtagcatgtattgaaatttccttcctttttaaggctaatattctactgtatggatatgccacattttgtttatctattcgtctgtcagtgggttgcttccacctcttgactcttgtaaatagcactgctatgaacatgggtgcattgaggggttttcgacataatcataataattgctttatggagaccagcttggaggagaacaagatggggaggaagtgtggaaaccaatgagaaggctctcagggtatagcgggaatacagaggacgcatgatgatgcctggacttaggtggtaccacagggatggagagaagtagatagagtcaagctatttaggacgtgaaatagacagcatttgttaatgggagaggtgtggggcgagggagaagaatagagggagaaggaggagtaatgggagctcaccagcagcccccatgttatgcctctttccttccttttccctcttctctcatcaggcattcagcttttgctgagtacttctgtgtctgacaacaggctgagcactcagcactgcaggacaggactatgcaaaaaacctctgggcctagtcctgggtgcactgctaattccctgtgtgaccttgcacaagacatccaagctctctgagcctcggattccccacctgggcaggaagagtaagtccctgcctaagtcatagggttgtaatgaagagcaaagcagaccatatctgttaagtgttagggacaagacaagcatgaggcatattttcaagtctcggctcctgtaggcagctctcactaagggctaaagggcttctgatgcctgggatagaatctgtccggcagagtggagtggaggcagggggacagccttcagctgtggaattcctccagtcctagagaccagcctgagctgggggacattattccagtcctgaggcatgagagcagaaggccgatgcttctgccctccatcctaatgtcctcctgcagggacccaaggtggatggcatcgatccccccgggtgagctcagccctgggcgcatggtggggcccaacatctcaacctgtttcctaaccctgagccaggcaggacagatcccagatttgtgcccaagagatgctctggcatccatgcccaggcccacatagggatagagggcagggtgaaagtctctctccctcactcgggtcctctggagaggggctctgtgtcatgaagctgaccttatccgcatctggtctaggagggaggagggaaggagctgccagtgctaaaatctcccccaccctcaaagggggacttcacaggttattgctggttttggttgttggaagctgacagtgatttattggcagattgaagtgagtgtgtgtgcgagaatttaggatagaatctactgatagcttctgaggtttaccttccccaggtcttaaatctggagataataaaaatataacagctaatgtccaaagagcacccgctgcgtgtgaggctcactgcactaaatgctttccatatgtttctcacaagaaccttctaggtagcactattatgattcccacttaatggatgaggaaactaagctctagaaggctaagtgactaatccaaggtcacacagctattatgtcacaggctctgagcccaggtgtatctggctgcggagccaccaccactaacccctgtataacgctgcctcacagaactgtggctggctctttccgtatcccccatgcccctgctccatcatcatgctgtggtgggctctgaactgtgaggacagggatccaggctttcaccctctctctgtccctagctgccagtgcacttgggcaaggtcacatcctatttctgggcctcagtttcctcatctgtaaaatgaaaggctggattgaatgacctttaagatttccctcacttggaaattccacaagtaagtcattatagcatggagcttgcatgcatgggctccagcgtcaggccagcccagctctgccagttaatgggtgtgtggccttggatctgttacctaacctttctgagcctcatttcctttgtctgagaaattgggggtgacggcagtgtactttctttgaaaagttatggtgaggaatagataagatcatgtgtttaaagtgcttacttggcacagtgcctgtaacttagttaaattcaataaataaatttcccattcttcccatgatcatttatttttaagggacatttgtctgaccagtttgatttatgagattattggtgtttttcatgaatgttaagacgtacgtgcgtcatcttagagtcatgtactctgatatattcacacgtgcacatccacttactcggaaatgtacacacccaggcacgcttattctgtctccttctctgccacatacttgcacacattatgtgagtgtacacacatgatgcacacacgtctctgcgatcttccatctctcctcggcagccctgctggtgtattggaccctggccttcatcaccaagaccatcaagtttgtcaagttcttggaccacgccatcggcttctcgcagctacgcttctgcctcacagggctgctggtgatcctctatgggatgctgctcctcgtggaggtcaatgtcatcagggtgagggtaagcaggccacctgggccagggtggggtgggaagcagaggctctggcctctgtcctgccctgggttcaggcccccaccctgcttctcagccaaactgagaagggatcagcttgttttacccgcccgtgtaaaggggagtggggccgtggcggaaatttcaggatagacactgcatctggcccacgtgtgctctaccccagggtcccagagggagaggggggtgatgggtgtgttcgctgaggttggcggatgactttccgtagaaagggaagataagcatcaggcactggcctctcctactttctttcttcgggggtgggggactttgctttaatgtattcatatcgtcacgctggtaaatgaatgagtaagtgttttgttttcctttctgtttgctcccgcctccctctctcttcctcaccccagactccaaccttccccttcccctgcccctacctccccaggcagcccagactaatgaactcgtttgtctttcccatgctttgtttttattagtataataccatatgtgtctgtctaaataaatacctattcaggttttttcctctcaacacaagtgaatatgtaggtttcccccacggtatttatcttgtaagaatgggatcatattatgcagttttctgcactgtgcttttctcacccaacaaatatctcttgggactccctccaagccatctgatatggctaattccgttttcttaatggctgcataatattccatcgtatggatgagccataatgtgttcagctatttctctatggatgggcatttactttgttgccaagttcttgccttcatgaataatggtgtgttgaacatacttatatatttatgtattgctgcttttatttctatgggagagagtccaaggaatggcgttgctgggtcaaagggtctgtgtattttaaattttgatcagtgttacatattgccttccagaaagactgtaatctgccagcaatgagtgagaaaaccctttccctgccttccaaccagcagtgagggctacagccctttcgaacttggactgcctgcatttctctgactcttctgcttttagttggtgatctgcagggcacaaagctccttatgtgtccccccatccagtgaccctcacaggaaccctgtgatgcaagcaccatcccctttatagatgaggaaacattttagatgaggcttgtccaaaaacaccttgctagtaagtggaggaggcaggattcaaaaccaggtctgcatgacttggagttctgtgaactgtatatgaaacatggtggtatccttagatctgtggagaagatagcatatgagagattcctgctcctccccaacccaacctaaacccaacccagcctagccatggggggttcaaagtcgacctcaatgagcagttacaaagtcaggatgccctgacattggtggccaagaagtgttggggaatccttttcctggtaataattacaggcgaaagatggccccatctgttagagatcaagtgtggaatatcacaaccccagatccttgctggggcaaggtagggagtggtgagaagttggacttacccatcccccatggcccatgtgccccacagagatacatcttcttcaagacaccgagggaggtgaagcctcccgaggacctgcaagacctgggggtacgcttcctgcagcccttcgtgaatctgctgtccaaaggcacctactggtggatgaacgccttcatcaagactgcccacaagaagcccatcgacttgcgagccatcgggaagctgcccatcgccatgagggccctcaccaactaccaacggctctgcgaggcctttgacgcccaggtggtcagtgggggcacagccacaccatctattcactgccttctggtttagggtcacagagagggacctcaaagggcattaggtcaaaatcctggtgggacaagaggggaaactgaggctggtgaggggaagaagcttgccttaagtcacacagtgaaccagggacaggtgcagggctgaggattcataggacaggcacagttggaatggcccttaccgtttaggtcgtctagtccaaagtccttatccagatggggaaactgaggctctgagaagggaagtgaccccactggactctcacatccctgtgctctttcctctgcagcttactgactataaaggttggagtgttcacttgatttggagcaggggtgttagtggcctgatccttatggtaactctatgagttgagccagacaggaatctccccatatcactgaggagcaaattgaggccctgagaaaggctgtgacctgcccagagctggccacagctggcaggcggcagaggcagtctcctggctcccagtccagtgctccttcacttcctctgccctcgcaccagggcagttgctgaggcagacacggtggcaggtggtaatgagtgagtgtggcacatggccacctcctcattccagtgctgtgctcatcacatagtccctgaccagctgtgtgaccttgagcaatcatctggccttagtttccccatctagaccatgttggtgttgatagggccctcccaactgtgcacttgctgattccatgatctcttcctggagttcacctatttgcagaggatgtgaccactgggtttccccagacaacaggagctaggggcatcctgggaggctaggcccagccgtgaattagccctcaggcactctgacctggccatggtctctctgggcagcggaaggacattcagggcactcaaggtgcccgggccatctggcaggcactcagccatgccttcgggaggcgcctggtcctcagcagcactttccgcatcttggccgacctgctgggcttcgccgggccactgtgcatctttgggatcgtggaccaccttgggaaggagaacgacgtcttccagcccaaggtaggcagccccaggggtagggtaaggcaccctctagatggttttcagttgtttctgagagtgcaacaggccaatgtgtgtgagccatggccacactggagtggctcctcacacatgcgcaaagcccatagcagtatccccaccacagaatactctacatctggtcaacagaaatgccagagggcgagcctatgccccaagggtatcctactctcctctcaccgtcactaccatagtacctctcccggtagttaggtcagtccgaaaactgcaggaagtgcttttgtttgtccagtgtctagagcttctgtgacttggatttgttggctttcagttcatgtcatcttagtaaactctttaaaagttttcaagatctgtcttcttcagtcctgtaaaggctggcacttgagctttctgcaggggcatcttgggagctactgtcagaggagagagaagtgggaaaccctcacgagtggagctttgtctctccccactccaaatttcattcaaagctgcccgtagttttattaatatgttggacttttccattaaaatttcttttttaagaaaagtttccatggcttaaaaaacactggagacttattagactagattatatccaatggccttggcagttgtaacgattctgcaaactgaaatttgttggagctagaaaacctttccccggggttatttgccctgcgtggggccgtagcatccacttcgggggctgggcagactgtgctctgttgtctgtttccttgcagccgtttaggtttaaatggccacaaaatgaaaactttttcacccctaataagtttcagagttttagtttccaagtgaggatgtcattataacattttaaccacagacagtctgaaaataatgcagagaatggggaattagggtttttaataatttatgacaccctttgcgtaacatttgttcatctcatgagctccaaaatcgcagccagcagttaatcctcaggaggtttatgttcatttttctggagacataattagtcagctgaacagttttggccacagatatgagatacgttgagtctgatttatgcagcaaactttcattgaacactgctgtgtgccaggcctgggttgggctgtgggaatatgaaagcaatagttatgatgaggatgattaacaatattaacagccacttactgaccacataatacatacctggctgtgtgcaggagttatccatgtgttatttaatccctaaaactatcctttggcgtgagtatattttgcaacatctttactgtggtatacctcaaatactgtacagtttatgagatgataggtattcttatccccattttacagatgagaaagttgaggctcagaaagtttaagtaattttccccagggtctctcagctagttaataacagaggcagaatttgaacacaagactcactccacagtctgggcatttacagccaggaagctaaattgactattattatcaagccatcacctctggctccaaggattatgaaatccaacagtgaggagagaaatcaaaataaaatacttttatgctatgtgttacatgtgactcttaggaggaatattcagggaattgtgggaaaagatagtgattaacttagccagtggtcatgaacagcttcatagaggaggggatgtttgaaaggggtcttgacggatgagtaggaatttgccaggctgccatgggaagatttcttgctcaaccaagaatgcaaggaccacttttgcttatttaaactttgatggcttttgaagccatatctggctttttgagcctctctactttacctggcccataaaagagaggggaagcggctgcttctcttgtctacaggagtgtcacctttggctctagcctgaccataggctaccccagaatacccccattggcgatcctgaagcagcatggagccagttgttaatatcagggggaaatggcacaggccagagcccttatcagagtgtccacaccacgctcttcttcctgtgtttcccaaaacccttgtgggattctgctaaggagagagctctgaggcaggacgtgccaaagagatggcgaaagcacttagaattttagttcatctgaacgttatcattgccgtttttttctctttgtttatacacaaaccctggggtttattaccgtctcattggaatgctcttgtcccagttacttagcacacaaatccctgagacagatggccctgcctcagtggcagtgggccttatcagatttaatattttttccctgcagcccaaacacaatcagaaaatttccgacacagaaacaagagttgaaagtaaatatagtctccagtgtccgcaacaaagaactctccatcatgtggttgcctgggatgtggcttaattctcatgtgggcttctgagctcagaaaatgggggaaagggatcatttactgagatcatttggttcatctcccagcccccaagccattctaatccagagagaaccgagtgctattctggtctttatgaatgacaaagaaggaagctccctagctacatgttgcagtgtttcacagtctgggagaggaagccgttttttctgcccagcctgaatccatcctgcagcagttggcacagcgaggcacctgtggtttattcatcatcactcttccttcctaagatactcagagttggcaagaaacatgtcatccttggtatccgcaaggacgaacatttctgatgtcctctttagttactgaaagtgtctgtgacttgccagatctttgatgctcctgtcaccccgctgccactccccagggaaagctgggacccaggttgggctctgcctatgatctatagctctttccagcctcctctccaacccaacccctactcccaatctgtcacctcccatggatgccactgatctggctgaaggacaagagaattagattcataatgagctgctggtgtctgaaacctgccagcactgccctgggctatcagttgagccaaaggaagaaggaacagtctgggtttgatcgaagggctaaagcttcaaacagcctctaagtctcagtaggaaaatgtgtaggtttgggagggtgtatgtgtttccgaatgagttcccctaagaactgcttatggttctatatgtgtgttctgtttgtccctgtgtcttttggtgtgtctttttctgcgtgtgtgtgtgcatgtgtgtgtgtctatgcccccgtttggattgccatatttgtggctatcattatgagtgacttaatgagtgtatatgcattggtgtttctgtgactttgtggttttgatgcatgggctggcctcttcataaccatgtccatgcagctggtctggcctagagtacctgccttcaattcactagctccttcttggccatcaagactctgctcaaatgtcacctgctccagggagccttcacctggttgaattagatgccccttatctgtgctcacataacatcctatcaaagcgccctgtttctttccctgacttgatcctctgtcccctattgcctgacctctgtgtgcccagcactcagcccactgcctgacacccaggagatgcacgggaaatggttctgcaaagaaggaataatgcagcaattactatatattgagtgcttacacttactgttttttcacatgcactgttacattgacttctcataacaactctctgaagtcccttcatagcctcaccttacagatgaggaaactgaagctaagagaggttgaggaacttacctaaggacacagtggctaatatatgatgagtcaggacctctaagtccaggctcttaaccaccgtgtcaaacagtcttgtatgaatgggtaggtgtgttggtctctgggtggccaaagataattttattctttacccagggcctcccggggctgggacctacggacaactcaccttttgacacctgccaaaataggaaacaagagtccaagtgatcccctctcctttaagcaccagagaacatgtgaaggggacctttccaatcatacctctggcctggcagagacaatggggctccaaactgtagagtcgggagtgctgggttttagtcctacctctgcagctaactcatttattctcctcagcagtcacattctgcaagcctcaaatgcaaaatgtgtaataacttctgtagaaagtacatgggggcatgaagatcattggcttgattgcttttaaaaaatcggtattgagcactactggggaaatccctggaaacaaacacaattcttccctgagagcttgtgaaaatgcaagactagggcctatgattttccaaagcattttcttccaccaagtgtcaggttgtaggtccttggtcttttctctcttgccttggtacctgcagggtgctgaccagtgctatcatatcccctccccgtttcctaggaccctcttctcggtagactccaacagggcctgccttccttgggcagcatggcaggcctcttggctagtctagtacccacttcttttttttttttttttttttttggatggagcctcactctgtctcccaggctggagtgcactggcgcaatcttagctcactgcaacctctgcctcctgggttcaagcaattctcctggcccagcctcccaagtagctgggattacaggcatgcatcaccatgtccagctatttttttgtatttttagtagaaacagggtttcagcatgttggccaggctggtctcaaactcccgacctcaggtgatctgcctacttcagcctcccaaaatgctggaattacaggcatgacccaccacgcctagtcaggtacccacttcttaactgaaacttagctattccaggttctatcccttttaaaccaactctttgaagagaggtctaataatgacccaatgacttatagctgcagtgagatttttattttaacaggtcacaaaattctcaatccacaaaagtagatttctgaccctaggttattttgttgggggcggagagaggaagtcaaaggttttgcagcctttagagctgcaaaaccagaatttgttgttttgttaaaaatgcacaaataccgacgagtatatttaagtaacacccatagtctaacgaacaaacatgatcagttggcttttccagccctcattctccagcctgtgtgttttctgctcattgtaacacagcgtgtgtgtggcattccatgtttctccagagctttcatgagaatcagtggtcttggatgcatagtgttcccatgagtaccttaattacctaaccattccctgtggttggaaatttatatgggtttttgcattctccttctgctctgaccccaaaataaatgtctgtgttcatacagctattaccttatgtgaaattattttctttgggataaattctcatgatgtgttgttgctttaaaatagtggactccagtctccagagctgcgtctctgcagaggacagtgggacagaagaatcccagggcatgttaaaaaggaccgggtcttcctaaacccacatgcctatatttctgacccagtaccagccaggggggcaagtttccatcccccacaagtcacaaacctgtaactgacactaggatgcttaaggtcaaaggcctggacgaggcctagacagtgggtctggggtagtgtttttgacatcactcaggttcatgttcacatgttgtccccttaccagcatgtgaccttgggccagccactaaccctactgaaactcctttttttcatgtatgaaatggggctaataatggtaccctcctcattagggtattgtgaggatagagttttgcacctgataaatattgtctcctgccccttcctcccctggaaattcaggtctctccctgcagcctaattttaaggcccatttttctgcttccagcccacccctgcccttctaccttcgacctcctccctctgcctctccctctggtgcactggcaaatgggacagagagcctcggtagggccttcctcttagagtcttgcacgcatccctcagtggtctccctgtggctgcttcctgctgccaccaacagatacagacccctgtcgcacagatcatggtagagacagtggtgagcaggaccagacagctccagggagcagtgagggctggcttagagaacctctgttaaactgagaggccaccatcaggaagctctgatccaagatccaggaatccctgactctagggaaaggcctccaatgagagcctgggccctctctgcctgattctgattgtggatgtgccctcaaactccttctcatcactttgttccatccctctttaccctgcagcagctcccacaccctgccaaacaggatgcacagtccagggcagtgtctgagaaagagcagagatctgtcttcatggaaatattgatgtggctctgctggggagcaatggatttatcaagatcaaagttttcctgggagttattgatgcttaatttggaaatagacacactgttgatccctggtatctttagcaacaaagttaaaatgtttgtttttcttcactggttgccatctgagatcttgccggaagtacacaagagaaccttaaatttaacaggaggccctgggagcccatgaggctggcgggcttgggtctgaaatcttttcagtctcttgtaagtgatgagctctcattctctcctgagagctctacggtgccatgttttccactggccttttctgctcagtaattgctacattacaggctgttggtaagttcggaacaagggagctgctgattccatttctgtagcagagaacatgcaccgtgagacttgttgtaccagttcaggttttaggtgctctatttattcttgccccattcagaatgctctcccctgggtctgtggccacaatgctaagagtcatatttatgggcctgcagttgtaattgggccccattctgttcccccaagtggaaagatgaacagggtgtaagcaaccttccctgtagttagaaaaacgtttagttggatttatcagtctgatttttcactcataaacaattgcacaagcctttgcaagcccagagggtcttgtaataatgatggccgtggtccattatggcacagtgatgtgttctacggtggtcattttgctggcaatgacagtcacctctgaacttctctttccaacagacacaatttctcggggtttactttgtctcatcccaagagttccttgccaatgcctacgtcttagctgtgcttctgttccttgccctcctactgcaaaggacatttctgcaagcatcctactatgtggccattgaaactggaattaacttgagaggagcaatacaggtacttggatgattattttttcactttgccataagaaccattattaggaataatgtccatgagtgttattcatcctcatggacactcaagaataattctgctgtaaatttattttttgttgcccattaacgatgttttaaaacagtaaccattgacaaggcagtgtgggatagtggaaaatatcttgggctgaacttgggagacagtgtagctctggctctggttctgccttggactgggtctgaaaatccagctgctcagcccttggcttgaaagtggtagacgtcactaattgatcacagcactctttctgaccaagggtaaatgcaaccttggaatcctctctaagtggctgttccagagttctgctaccagacagtcttctttgggtgtgaaaaaaggaatgtgcttgacatacaaggtctagatagcctctaagacagggtcccctctaagatggggtattggtccatggcctgttaggaactgagccacacatcaggaggtaagcagtgggagcaagcattactacctgagctctgcctcctgtcagatcagcggctacattagactctcataggagtgcgaaccctattgtgaactgtgcaggcaagggtctaggttgtgtgttccttatgagaatctaatgcctgatgatctgaagtggaacagtttcatcctgaaaccatccctctcccccaggtccatggaaaaattgtcttccacgaaaccagtccctggtgccaaaaaggttgaggaccactgctctaagttctatttgaacccttaagtcttgctcactaatgagagtgacctatttggtctgttgggtcacttaagtctaggctcttggtcctgccttctgtgatttccttcttagagtttctggaaagatgatcaaagccagggagtgttcagggcccctctgaagaaggtgatgatgagagttgtccaagtcccagggtcttcactaggattttggttcagctatcagactagagagacatcctgattgagagtagtttaaatgggatagaagtttgtttattcttcagatagagtcagggctgacacaggagctactcaatgatcagagacctggcttcttctgtcatgttgctctgccagccttcttttgtgacttttgtctccatagccatggtgggtattgaaactgccactatatttacatttaaactagccagaagaagggacaagaggagggaacgcattttccttttaaaatggtaatacctgatttgcacataccctctcgcatcccattggtgagaaagtggccaaatggccgtatctagagagtctagaaagagcttggtctttattcttgacagctatatatgcactgctagaaattctctgtgcaaagaggagaatgggcattgggaataactagatgcagctatgcctagtgatgtccatgaagttgtggtaaaatcctgaagctaccttgttctttggaaatgttcctcagaatcattaacattagtcatgtgggagacaggagaagaagctctgcagaaaagggaccgagaggacaaggatatagcttgggctggggacaatgtcagagtccaaactctggctatcttggaatagtctgtgtgaacggtgccctcccaagttgtgcagtgcacaacctgtgcagctatatatggcaaccctgcccatccccagtggtttctcactgggaaagcagagtatttcctcagggatgtcattatgtgacaatagtggaaaaagcccaggaaaatctaagaccttctaagactcatgggggcccagagctgggaggaaccaagctgttgctcagttcagaaaacttctctagaaatcccagcctctcctcacacccctccagtgacaggcagacttgcaccaccacaagcaacagccacttttgtggttgggcagttttgtaattaaatatactaatgtgtgtatgtcataaattacattttccaattatgccaaaagagccaaaaatggttttttaatggttagcatataatcgtttttatcaaattgcttgaatctttcatgttaataagagagattcattactatgccacaaaaagcaaatactggcattaattatagaaacaaattaggggggtggagcgcaatggctcatgactgtaatcccagcgctttgggaggctgaggcgggtggatcacaaggtcagaagtttgagaccagcctgaccaacatagtgaaaccccatctctactaaaaatacaaaaattagccaggcatgttggcgtgcacctgtagtcccagctactcaggaggctgaggcaggagaatcgcttgaacccagcaggtggaggttgcagtgagctgagatcgtgccactatactccagcttgggcgacagagtgagacttcatctcaaaaaaaaaaaaaaaaaaaaagtggctcatgcctgtaatcccagcactttgggaggccaaggcgggtggatcacaaggtcaggagatcgagaccatcctggctaacatggtgaaaccccgtctctactaaaaatacaaaaaaaaattagccaggcatggtggcgggtgcctgtagtcccagctactcgggaggctgaggcaggagaatggcgtgaacccaggaggaggagcttgcagtgagccgagatggcaccaccgcactccagcctgggcgacacagcaagactctgaaaaaaaaaaaaaggaaagaaagaaggaaaggaaaggaaagaaaggaaaggaaaggaaggaaagaaagaaagaaaggaaagagagagagagaaagaaagaaagaaagaaagaaagaaagaaagaaagaaagaaagaaagaaagaaagaaagaaagagaaagaaagaaagaaaaagaaaagaaaggagttagggagaaaaaaaccctttctttctttcttttggagatttccggaaaatgtacccttacggatgagagcctgtgtcttcatgggttagagaataaccacgctttgtgcataaaaagttattaagcacaattcctgaattatacataattactagctgtcagtcagttgtgcatttctgtgtatgctggtcttcacttaataagactttatttcacagatcacttggtgtccctacttcactgaaactaggtgattatcttttgaagtctcatttcacataacctaggaggtatatagatttctttaaaaatgtcattgccattattttaaaccttacccatggtatatataaacttacagaaagacagaataggttcattattttaaaccttgcccatggtgtatattagctcacagaaagacatagaataggttcctgccttaagaaaacctgacccacaaaaaagcctgggtttacacaaaagaggaattaagggcggggagcccaccttacaacagaatgaataatagaattttatccaagagcaggcatcctgaggacatttaagacccggatgcatttttccttgttcaagagcacacatccaaaaattgcagtctttctgcgagtcatgatcactctgcacataaagcgtttaggttcagagctcggggaggccattaccatggctgctctctgtctgccctgtgagggtccttggggtggctgcactctggggatggtgctggggctgactgactcacgcggtcgtgtaacacatcagaccttccaaagtcgaacccttgttttgtttcaaggctcaattatgacaggacttggtctcagagcagatcccctccctaggctggagaaggccactttaaaacagatggcctgccccacttcatcatttttatggctctgatctgtgttctccactggcctctggtaaatcaagaatacaagtggacatgaagatctgctttaaaaaataaagaacagaccgggtgcggtggctcatgcctgtaatctcagcatttggaggccgaggtggatggatctcctgaggtcaggagtttgagaccagcctggccaacatggcaaaaccccatctctgctaaaaatataaaaattagctgggcatggtaggcacgtgcctataattccagctactccggaggctgaggcatgagaattgcttgaacccggaaggtggaggctgcagtgagctgagatcatgccacttcactccagcctgggaagcagagcgagactctgtctctaaataaataagtaaatgaattaaattaaataaaaataaagaaccaattaagtcctgtctacaggaaaaggccttacttgctggagaagtagcttgctgtgctggagtagactagtaagttggaacggtgatacagtaccaccttacagagctgctctagggcaccatggggactgtctgagaagcccctggcacactgtaacaggtggcatctggtgtggtgatgatgatgagaatgatgatgaatgtgaaacactctgctctcatttctagaccaagatttacaataaaattatgcacctgtccacctccaacctgtccatgggagaaatgactgctggacagatctgtaatctggttgccatcgacaccaatcagctcatgtggtttttcttcttgtgcccaaacctctgggctatgccagtacaggtactagatgggctgaggggaagggaggggggcagcaggacacacaaccagaatctgctggtccatggccagtaactaggagcacaccgtcttccactccatgcttgcctgtacctttcacacacttggctataccacaggctgtacctctgggtccctcctgtcccatactctgcaagcactgaccatctctcttaatgaccagagaaggcagtatcattaagactttaaaaatggagccaactttataaactatagaaaaatcaagccaggttcaggggctcacacctgtaatcccagcactttgggaggctgaggcaggaagattacatgagcacaggagttcaagactggcctgggcaacacagtgagaccccttctatgcagaaaaaaaaaagaagaaagaaaagaaaaatcgtacatggaatgcccacagatcttaaaagctatgttgtagcaaaatatttaattacatcaaaaagtgttagtgatgtatttttaagcaaaaagagtaagttacaaatagtatatgttgtatgcttactactaaactggaatatatgttatgtatacatttgtacagattcacacatgaaaaagaattggaaaatcacatagtgggattataagtgatttttattttctttatgtgtttctaaattctctaataagcgtgtataagatttggaaatcaacaacatgatacttttagcctaggcaacaaagtgagaccctgtctgtacaaaaaattagctggaagtggtggctcacaactatagccccagctactcagaggctgaggtgggaagattacctaaagtccaggaggcagaggttgcagtgagctacaatcacaccactgcactccagcctgggcgatagagtgacaccttgtctcaaaaacaaacaaaacctggtgttttttagccagatgtggtggtgcgcccctttagtcccagctacctgggagtctgagatggaaggattgcttgaccccaggagttcaaggctgcagtgagcaatgatcacgcccctgcacttcagcctggacaacagagagactcctgtctcttaaaaaataaaaataaaaacgttaaaacatggtatttttttaaagcaagacaacctttggtgctggctcaggaagaggtacattaccccccaataatcagaggagaatcgtcagcatgattgatctgacctcgggcttcatgtgtcccatctcccacccggagctcttccaccacagagtctgatcctgtcctatgcctgggactaaatcttcaccctggtgttcaggccagaaaccgaaatcccagacccattcccagagggcgggaaggttccaccgggagagcttgatgtagcagaaagtgacttgggtgagacaggctgattcaaatacttaacctctctgagccttggtttctttatctatgaaatggggaggctgcccaccctctggagttgctatggcaattcagttagataatgtaagtaacacagcaggcagagtggcccccagagtcttcacttcgtaaatatcagatccctctaccttgcacatgtttggtatgagtgaggtgttaccaatccagaatccattgcttcttgggataaagattccataaaccttcatctccagtgatttgtattggtcctccttacttgtaaagcttagagtttaaaaatattaaaagaaaaaaaggggagaggctcccacagggacacagctagacaagatgagatgcagggaatctgatgttcttttttatgggaacagtcatatatgccatcccccattaccacctacccatgcccagactgcccccgctccattctgccaagacagatcaatgactataaaagctacaaaagggcctggagatctcatctagtttagttaccaaccaaccttttatgcacaagactttctaagctgggtgtggtggctcatgcctgtagtctcagccactcaaaaggctgaggtaggaggatggcttgagcccaagagttcgagtccagcctgggcaacatagagagacctcatctctaacacaattttttttttgaaacatgaaaaatgaagatttctgaccatgcttctctcattagttaacactttgggctgtgagggtctgatgcagagagacacagcctgggaggatcctaacatgtacacagcattcaaaaggctacaagacactttctgttgtgtccccttgaacaagcagtttgtaagattttgttggccaggcatggtggctcgctcctgtaatcccagcactttgggaggctgaggctgatggttcacctgaggtcaggagttcgagaccagcctgaccaatatggtgaaaccccgtctctactaaaaatacaaaaattagccgggcatgatggcgtgtgcctgtagtctcagctactccggaggctgagacaggagaattgcttgagcccaggaggcggagactgtggtgagctgagatcgtgtcactgcgttccagcctgggtaacagagcgagactcggtctaaaaaaaaaaaaaaaaaagaaatcaggttttgtctactaaacctgctgcacggttaccgttactagtactcacagggtttgttgcacatgcatcgttgctaatagtgctaactaatattaacagcccttgccctatgcctggccctgtcccagcccccctcccttgtataatttaacccttgcactgggggtagagattttcatatctactgatttcttacctttgctcatttatcatggagtgtcctttggttttctgtgtttgtatatacctttaccacttatagatttgaccagcactcaagaaccagtgttactcctgggagttaatacaatcccagccccatggcaaagaaactcatgtggttaggattctgtgtgcagcctggttagccacagggcacgtaaggctttttataatattgacatgagtgcagaagccccattcccgtgtaagccctgagggctcttgtttcataatctttttttggtcacatgcacacagctttattgagatataacccactcatttaaagcatacaaatcagtgggttttagtgtcctatattcacagagctgtgcagccatcatcacaaatgtggaagttttcatttccccaaaaagaaacccgtacccattggcagtcactcctcatcttcgcccccagcccttggccaccgtttatctacacatacttttgaaaggctagtgaaactttctcagaaaaataaatgcttgctcaaacatttgggctataatttcaggggcttcatgggtgcccccctgacatttatcaagaacaccaggttaaggaatttagctataatggaggcctctgtgtttcccagtctcctgggtatcagaggcccagagagggcaggtgccttaccctgggccacgcagtgaaccagtggcagcaccatactcacacatctcctttctgcggttccccagtgacagagttctcaggaagctttttcatttattttctgagaggagggtaggccatcttgtattgatctccaactatatgccagccacaattctaggtgcttatcataaaggttcatttaatcttcacaatagtcctgcagagtggacagagtccttcagagtgggcattataatcaccattttaaagatggagaagctgaaaaccagagaggttaagtaactcacccaagactgcacagcaaaaggctggggctttgaaactcagggccacagactccaaagactatgtcctccccactatgctagatttttttcctaacctgtgaataggagacaaaatagtccttttatttctcacagttgctttgcacactcagaatccatgatttcttctgcatgagggccattcagacctgtgcagaagagagtaatggaccaaggagtcttgggagcacctaggaggaggggatgggggagcatgaggaggagccagggaacagcagcagctgcagcaccagctcccaccccagcctctgccagtctcttggaggtggtgtgggtgcagacaccggctcacaaggtgccctgttagtgagcttggggtgccatgggagccttcttgttgtcaggcccaacccaagctggctgaagaacaccctgatggcctccatttgagcacaactaatgaaggactggatgccagagataagtccaggagggtgatgctgcagggcaggccagggaagagggtacttcatctctatcatggtcctctgcccatccatgccagcatctaacacctgttaaacactgggaggcaggtggtgaaggggccacttcccagcctctaagatacctcctaagccaggaggcattctgtgattaaattacagggcctcccacttactcctttatccttgaggcggtgctggaagcttaatgccaatctggtgtagggctctgggactacaggaccaaggcaagcagtcctttctctctctctctctctttttagctaaggaagccagcacatctgttctttgagaaaaagccctgtatttagaggtgtctgcctttgaaggcaacctgagaaactgtcatcttggcgctttggggactggccatttacacttctcataaatattcagaagtaggcagtcatttacataaagctaaatgcagaaggaattctcttttcagggaatacctggcagattcattaaaaaaattaaagaaaccaagagcataagaatgaaaagcgaattctcggaccccaggctggttttttctggcatgggtgcagtaactttgcctctttgctcagttatcacttttttccaatgacagtaaccataagccctgagagccagcaaatagaacaaaaggtgctgtcacaaacattgtgcaatctcatctctgagatttccatctggaaaatagactggagagagttaaggcttcaaccagccttgcagataaatgcagttagttaccagcccagcaaccctctgcttgcatgagagcccattatgctaacctccttttgaaattgctttgtttctcctccttccctgcactccactccccaagataatttggaaacctgggcaccaaggcttgtcccactctaggggactggggaaacagggattttgccagcacctcctggcagggcaaccatcaggtcaaagggacctgacccatgaccccttcctcagatcattgtgggtgtgattctcctctactacatactcggagtcagtgccttaattggagcagctgtcatcattctactggctcctgtccagtacttcgtggccaccaagctgtctcaggcccagcggagcacactggtgagtgcccaaaggtgtgtgtgttttgtccctcttcccctccttccctcgacagcagcaggtctcctcccacacacccacactgtcattgactttgactttgactttgagtaggccacttcacctgtccaggcctcagcttctttgtctgggaaatggagtcaatgggggaggaggctgcctcccggtgaggacaggaggcgggcatggcagtgacagtattgacactcaggccttcctctcgggtgggagacggagcagaagcctctcccctctgactcggggacccctgcaggagtattccaatgagcggctgaagcagaccaacgagatgctccgcggcatcaagctgctgaagctgtacgcctgggagaacatcttccgcacgcgggtggagacgacccgcaggaaggagatgaccagcctcagggcctttgccatctatacctccatctccagtgagttcaccccacacagccagccctgggtgctgctgcgtacatgcaaggagagggtgtcagagctcgggtaagagggggtgcagggacagaagcaggaggccttgagattatccgactcagtaggggagcctcaaactggctctgatagctaagctcccagaaatcaaagtactcttcattcatttatccaacaaacatgcatggaaagcctgctatgtgctggacactgtgctggccctcaggatacagtgatgaggaagagagatgaagtttcattcctcatggaactgatatgttattgacagacagcagcaagtaagtaaatgaccacagttttgaactctcctaagaatgaagactttttagtaagtcagactgagctgtcattgccctggggaagctacaagaaagcttccatccacttggggctatgcaaaagaaaaagactagttatccttaaatatcagaagcccaggctgaaggtactcacaggtgtagggactgaatttatattaaccaagtagtttgggaaccccaagccaaggaagaagaaaaagaccaaaactggtaaaagtcctagagtcccatatacttgaaaccattttactgagaatgtaaaacttttttttctttttttgagatggagtctcgctctgtcacccaggctggagtgcagtggcaaaatctcggctcactgcaacctccacatcccaggttcaagtgattctcctgcctcagcctcccatgtagctgggactacaggcacacaccaccacacccgactaatttttgtatttttagtagagacagagtttcaccatattggccaggctagtcttgaactcctgacctcgtgatccacccgcctcagcctcccaaagtgctggaattacatgcatgagccactgtgcccagcccaaaagattttttagaaattgaaattttagttatggaaattaattcagtgaacaatggtcccctggtcagagtgagggcttacggaggtcaggtgatccatggagtcctggcccaagtttatctcacagttggtctcgtggctccgtggacccatcccatggtggttacttcccaagtgcataattgggatgtagatatttagcaaccagctgacttcacactagttccctgacctgtccagtctaagagtcattatggccaagtggaagcccctggaaagaagaaaacaaaaaagaaaccaaaacttactcagtgcacaggttacatgaatgagtatagctgaagagagaatttttgaattagaagacagatgagtggggattacacagaacgtggcaaggagagtaagttggtagaaccattttacagatgggaaattaaggccagaggggagtgtgttcctgagatccctcctgaggttagtagcatggctcggactagatcctccaaagtctcttaactcctggtctcaggctattttccacaaagagctgggggcctctgtggggtgaagaagacttaggacaccatggggcaccattatgaggccatttcctcctaggagaaaaaaaatctctgggctctgaaaggagtagaattagggtaggaaattaagagaggctaccgaccacctcctccaactaaaattggttcttttggtgccaggaagagacacacctggtgggggagggaaggtggtaatggagggggtgctggtagtgtctcccagatagacccatccaacaagtctcatggagaatgagacggtcactcaggtcatctgcgtattcttggcattcttgctgcctagagagagagtctgatggagctaggtggccaccaagctgtcccactccccaagacagtttggaaacatgggcaccaaggcatgtccctgtctaggggactggggaaatatcccatagcagtgttctcacagtatggggctggccatgaataccccaggagtccaacctccctttgtccagctagaccatggtgtcctatgcctcaggcagggaatgtggtccagtcatcagtggctgggccgtctgccatacatggtgcaagccatggcgttttatgcagaaagtcctgctagcatttgattttctcagaatggagctgtgagcatggcaggcaaccactgtttcctggattcttcaccaagacaccccaagttcctggtctctccccgttatcctcatccctgaccctgtggttctcagagcctccaaacacactcaggctaagcactccatagacaggggaaatttggaaggaacatctagggagctcagaaaagccaatgtccctagccccaggcccacttcaaccttctctctgtcagtcctgcctgcccctggaggctggttacatgaagagtaaccccctgcttgtgtatagccccccagttttgtacaggtttagagacagttcccagcagtaggaacagctgccgaggtgggagagggcttctcccgatagccgggggacttcctctcccaggaacaacagggtggggtagagcaggcttgtcgttgctgagatagagagagggaagggaaacaacaaggaaagtgggggcactgggtccccaaggttcctggcacagcaagcagtgaagttggggcagcctcaggtcatgtagtgggggcaggtgacatctgctttgactgctcctaagagatatgtactcatctcctggattccaaactgcagcctgggacatgttttcttatataaacagcatcaaaagatgtgtgagttcccaggctagcccactgaaccctacctagtgggtgctcattgtcccccagagcccccagaagacaagccgtggctttgtgatgggcctggggccaggaggacctagggatatgttgtgaagagctgagaagactctggaaaaaaggggctctggagccaagcaggagcccgcccaggactcctcacgtgtccaagtcacctagggagagaaacagagcagcccaggttggtccctggaagagagcagcggaggaggggaaaggggagagcccctggggagagctttgaaagtcaagtgctgtttgctcagtgtgtttgcctttccgaggatgtgtttttttttccctccgttagtcagcagtgggagggggagagagacgggtggtagggtgcagggtacctcctggctgcaggcatatgctttgagtgcgtgttcatttacctcctctggacttcctgccttctgttaccagggatcaagacacaggtcattaggcgtgaggtaatggggcatctcttgttctgacccctggcgccagtcttggagtcctgacgctgcagaggagccccagagtcacatttcctgttggggcccatcctgctcatatgcggcaccatcagacttctgggcaggcaagattacctgtgactctgtctgatggtctcgccatcaatatcactgagagtagctgtgtatggagtcccgaactggtacaggataaaacagggggctgaaaagggaatgaatgggcacagtttctctggcatcaaaagtcacatccagaattgatatttcctgttgagtaaaaatagaaatataagttgctcagtggatgttgagtgagccctattcatgtgccccactctgtgccaagcaccaggaaggagggaagggaaaaatgataagatgttctccccgttctccaggagtttatgctccactaagaagtcagagctaacatgcacagaacagtgtggcagcgagagcagaaccgtgtggccagctccatgcttgccgcctagcaagcgtgattgcacttcatcctcataacaacttggtgaggtgtgttgctctgttgtcccattttacagcagagaggactgactctcagtgaattgaaatgtctcagtgaggtcttccacagcaaaaggcgaagcacagagaaggaagtccatgtgggctgggagttcacccagagattcatgtaggggcaatgtgggctgtaccttgcaagatggtgggatttcaatgaggagaagacaaagtgggaggaagctggagacaaggactgtggtctcttcctttagaagtcagttcaatctttttttccttgtggaagcagcataactctaggtggttcctctgtatctgaggacaagctttgtagaggtgacaaaggggtcctaggtcctatcaggcaagcactcgatatgctgccagttcattctgtccattgtgagatacccattccagagcgcttcctctgtgccaggctctacggaggttctggatgttaaagaggaagcaggcatggccctggccctcccagtcttgtgggagattgatcatgcccatgaatagtgaccatgtggtcagagccacagggtcaattccaaatgcccctgtttctcttttgtgttactcacctgactctgggtctttcgtttcttccattcattttttttaaacaaatatttcctgcccaccttctgtgtgccaggcctggggatgcagtgggagaagcctctgtcctcctcagtggaggcgctaactcagaacaggcagtggagaaaaacaacatgacctggagacctggtgccccttccttccccagcatctttgaaattcttttggttgttgttgttttgagatggagtctcactctgttgtcaggctggagtgcagtggcgcgatctcaactcactgcaacctctgcctcccaggttcaagtaattctccctgcctcagcctcccaagtagctgggattacaggtgctctctaccatgcccagtaatattttttgtatttttagtagagacagggtttcgccatgttggccagcctggtctcaaactcctgacctcaggtgatccacctgccttggcctcccaaaatgctgggattacaagcatgagccactgtgcctggcctgaaattcttcaatatctacctgcccttctgccagttggtgcagccacagtgggctgcttatgcatatcctggcctggcttggtggggagcatggctgagggagagccggggcacccatcaattaaggaggtaaagatcagtctgactgagatgcctcctgccacacttcctcagctgccagcaactgacaccattaacctgatttccttccccctctgttgactgcactgactattggactgaatgggaaacagccccgtgcacctcaaaatgcacttcccctcctgcagatgcatcttgcaattaggcccaaactgtgagcctgcatgctcctcccctggccctgcacaggcaacaaagctgaagttaatcagaggtacaaatggctggctatgcctctctgacacgtaacttctggaacatgtatcaatgctttggaaatgaaaagctcctggtattgcaatgccaggctggtgcccataagggccagaaaacattccttgggcaaagccagggggagtgggtgatctgatcccagctcaggtttgttgatttgttgttttgtttgtttcgttttgtatggggcaagggttgagggtatgaaaaacttacactatcatttactaccgtagtccccagaacccagcacaccagcacaaggcctggaacagggataccttttttgaatgaataagtctttttttttttttttttttttttttttgagacagagtttcactcttgttgcccaggctggagtgcagtggcgcgatctcggctcactgcaacctccgcctcctgggttcaagcgattctcctgcctcagcctctcgagtagctaggattacaggtatgcgccaccacgcctggctaatattttggtatttttagtagagatggggtttcaccatgttggccaggctggtctcaaactcctgacctcaggtgatccacccaccttggcctcccagagtgctgggattacaggcgtgagccactgtgcccagccttgaatggataagtcttaagggatatttttggaaaggatattctaaaaaatacccatgtctctacactattgcagaagggctttcagttttgatggcagcctttcaggccagcctacacgcaactaaacttttccataacagcatcacacttacacaagaagaaggttttataatccacttgccattatttaacatagttcttcctccttaactttcaagatctgagcactataatgttcttctttttgtttttgtttttttctaaatcaaattaaggtgagtcacctcaccttgggcctgagttggacagaaatctattcttggctatattccccacccctccaccaccttggaaccttatagaactttatgtggttcaggaaaatgagggcgaggcctcagatcttcaacccatgacagctgtatgcccagctccctgccttcctgtcttacccccagctagggcacaggactgactattgtgcccagagaggtgccagagcctgtaacaaccccagacttcccaggtccagccacatccaccccagagccccaaaagatgatcttcagagagacctttaaaacacaagtagctggtcacttccatccagaccagaacccaagatggctgtgctcttgctgagacatgttggttgtcattgcctccgagcccactttagccctcagctctgtaccagaaatgctgttcctttgggaatcacagccaaagaagagatggagcagttctggaataagaacacaagttcaaactgtcccatatctccccacatcactatctacagttggtctcttcccatggcgatgtccatctgccaccgtggcactggtattgctttgagtgcaggggtctctctttttggcatgttggccctgttactccctgggaactttgagtcttatttggaatgcgtgaagtccctgtgtccggggccagcactgatccacacagctaagtttgcactcatcttccctctcatgtatcatatctggaatggggtctgacacttgatgtgggacctaggaaaaggcctgaagattccccagctataccaatctggagtggttgtcccggttcttactgtactgtcctctgtagggctggcagccatgtgaagaacagaggttcccagcatcatcttcctacacattattacattcacccatctttctgtttctcacttttatctccagcctgggaaaagttctccttatttgtttaaatccttttgtgcttttagatccccttggagcagtagagtaccttgtagaccataagagtggaaaagggtctagttttctccttgtttctaaagatggggtggctgaaaaaactccccttttttgcctacagcttgcctctctgggcctagaagtggttattctgtctccatattggcctttgatttgtgctgagggtcagcttttggctccttcttcctgagacagtggaaacaatgccagctgtgtggcttctgccctgggggctgggggtgaggctttgggtgccactgcctgtgggttgctggcttaaaggacaattctgttcattggtgagagcccaggccattaacacctacgcagtgttattgaaagaagagaggcgggggtggaggggaattagtctatcccagctagagggagataaagagggctagttagttcttggagcagctgctttgaggagaaaatgtatagcttttgacacaacaggaagatccagaaaattatcattgaacatattaaaggttatttctttttcttgcaaaacacacacacacacacacacacacacacacacacgcgaacacacgcagctgatgattctactctcccagccccagccctgaaggggacccagaactccctgcacaaaggctgtccttcaaggggagggtgaaagaagtggaaaatcacattttcattctttagcgtctccatacaacagccagaactgggcagaagctaattatatcagaagcatactccatgttgctgcatcagctttgggatgttcatttttaaatttatttatagcttgtctcattcctcaaaggagttcagggagctacaaaaataaagacaataaaattgaaaaaaattaaattaaaaaaaccatgaccagggaaaatgtgcagtagaatgaagtgtcaattatcacgttttctgactgcaaaatctcccccacggctgatgcaccatcatttactacaacagcccctcttgttggacatttccagtttatttcgtttgggatggtttgttgctgttgctgtggttgtggttttgttttattgaattttgtgttagctgcagctaataccatcttgctgatggctttgcgctgctcttgaatgattactcaggataaatttcctggagacggattataggatcagaaggtctgaacttctgtgtggctctagctacaaagcaccagattgctttccaagagcgttgtagcaatttataatccaacactcagcctattttttggctgggagtcaagccccagaatgtgaaggaggggtcttggcctggagcaggggctgagggatgggtgcacaggacccctccttattggttatttatggggatgggccaggaggagcagaatagaggcccctgccctcccagttgctccttggagtgactgaccccataggggaggggcgaggctacctcacatttagaactatgtagttggtgatggtcaaggtcctaggtctgatgggcatcctcctccctctcctcctcagccagtaatggctgcactatgtcgtatgtcctagatctgggtcccttttgctgtgggaacaccaataatacttacgctgtttcctgccggaaacggtgcaggagggctgtggcatggtagtgggccctggaaaccatctagccttcatgaggaagggcagttaaagcacaggcatgtatgatgttggtattgattaaaagcctcacgggcagagaaattcgccatctgccagggccccagccatacgagggctccagccatacatcctccaggagactgggacctctccaattgcaggagccttgccttccccatcagattaggaattccccgaggatggggacaatgtccttcccacctgcttgagaactcctaaggggcatgtactctgtctccccattgtatctggaacttcctgggagcatagctcctgtctccgtcctcagactgggaatcccctaagggcagaggccatgtccttccacccacttgggattccctgaagttggggaccacatctctgatgtacaatgctttgtatgtactgactgctgcaggattcttggagtaaatgggcagtcaacttcttggactggtattgaccatctggacttcatcagagtgtccaagactttgccattcattagacaggggccatgtgcacaggcagagccctggcctctggcttctggctcctgactcctggtccctctgctttaatttggctaatggcagaaccagactcctttctgggctgccctggaaggggatccttgaatgaaagaggatagatgggaaggtggcagctgacatggttacctcttatgccatgggggggctgctctctctggaaatttaggcctggggtcagggcactgttgagcattttacaccctaggccagaggaggggtgacctgtggagcagggctaagctagtagcccatgaggtatgatgtgtaggcagcacctggggctcacagagcctgttacccatgttatctcctctgaccttggaaagagctggggtgtatgaacaagtatttataagtttacaaaaatcatatgaggaaactgaggcacggggaaggtaaatgacatgccctaggttacacagcttataagtagcagggattctgcccttctgtcacaccaagtcccactgtcttttcttcctggagtccctgtgactgatctaaaggccacatgtttaacagaataaggaggaggcctctgttgcagcaaaccagctaccccacccgcacacagactctaagggacatcctgctttaagctgtccttagttactaatacctcagtgagaatgagtttgaaattttctcaagagccatgggagactaggaagtctctaagcttcatagagagcctggcttggggggacacaggagccaaaggcagaggaagaagtggcagctttgtgcccccagaaacacgtgctcctgacctcacagttggccacagccagccaactctcccatccttctcccaccactttcccgtggggctaacttcaccctgtccacacggagtgacttaacagtttaagccccagagtcgggggccggggtacctgggacaagagtcctgagggaaatggggtgaggaactggaagtgccacagggctagagttctgcccctagcctactggagctgtgccccacaggctggccccactggactgcgctgcctccaagccatcctgggcatctccatgtgtagctgtcacgctcctcccactaaacgcctccctgtgcttcctctgcagttttcatgaacacggccatccccattgcagctgtcctcatagtaagtggatcctttctccatctcttgggggtagggtggagggggagggcgtctgcagtgacaggctgcccagatttggcctttctgcacaggggcctcagaagacaggctccacagccagactgaaaataggatcgaaagtttatagagggtgtggcccctccccaactccagccgaacaggggcctctgcctccaggcctggaagaccggaggcttagtatttagagaaattaaactttcttttaaaaaatagctatccaaatttttaatttttaaagtgaaacatgtgtattgtagaagtgatgggaaatccagaacagaaagctcaaagagaattaaaatcacccataatcccactggtaacatttttaatgtgtttctttccagtctttttttaaggcctatgatatgtcattttctacaaaaataggaatgtgctatgcatgcagttttgcaacctgctcttttaaatttaggaatatgccacacacaattctccatgccactgaatattatgatggtggctttctaaagcaattttgataaaagctgtgtgtgagctgagccatgggggtcaagcagcatgctcctacagaaaggcctgggcccctacgagcctgcagccccctcacccagcctcccatccccatcttctgtgatggctgcagttccttaaaaagatctgcttatttcccccggggccagtgtccctgagctgtgtagagttcacagcctgtcggatacacttgggaattcacttccaatgtgatgtattgagctggttcctggcctggctcctgggggaactgtgggtaacagaggccactgagccagccaggtggctggggcaaagcactgtgcagtttcgtaatcactctgtttacgttatcccgatgaggactggggagatgagcaccccgcctgctgtctgcagagggggccgtgctgacctaacccgagatctcctccctgcttattcccagccaagactgggcaggacagggagtcttggccaggacagggagggagcagcccctgctctccagcttgaagtcctgaacttgttggggacgtttccatgagatgactgtggggatgatgaaggtgtctccaactaaaagatcctcttaggagcctgctccctgacagccctctcatttcccttccagtgctgagcgtttccagtgtgggagggacccacaccctgggccaccctggcctcacttgtgcctctgtccacagactttcgtgggccacgtcagcttcttcaaagaggccgacttctcgccctccgtggcctttgcctccctctccctcttccatatcttggtcacaccgctgttcctgctgtccagtgtggtccgatctaccgtcaaagctctagtgaggtgaggggagggtccgggcgagggcactgggcaggcaggtcctgtgtcagcctcaaggcttgctcgagtgatggccaaaccacagctgtttggtcccggaacacacccccattgctgggccttgctgtagctggtcctggttggtcagagggacattggcctgtatggtttcccagctcgccatccctgagcaaggacttgcttacatacctcccaggagaggggactcactgtcactttcacgacaacttaaaaaaaaaaaaaaaccagtgttgagccaaatgtggaatcctcctaaattctacccactggtcctaacttcaccctccagagccaccaagaatgaggccatcccgtccccacgtggctgccccatggatatcagaaggcatccactgtgtctatctttcccaggccaagtatcccctaccctttccacagcccctgagccctcacagcctcagccagtgaaacagcttcccccaagcgctgggtcctgctctgattggcccacagctcttggaggctcccacttccaggctctagagcctcatggggactctgccactgtcccagaggcattgccctcttgggaatgaaagcctgaaggtagaaggctgaggctttggctgggaaatgccctgtctggagtgagaagatgtccttgggcctctgaagtagctctgcctccttgaaagcaagagcctgtcatgcctctatggagggctggcttgtccttacccatggccagagaaccagtcagtaacaaatgtcctctgtgtcttcagccttgaggaaggtgacacccctgtctcatgggaccctggcaggtactgggaagctggaaggaaggagtagctgttggaatgaagtagctgatagagagggtagcttgcagggggagactctagcatgggttcaaagatggaatggggcataactcagcaaaattatgctctaaggagtatctgaccaggcagtagctggttaaacagggattagctcccatttccacagtcggctgtgctgactcagtttcttgaccagggtgttgtggggtctgaagatcacccctcctcccaccacccactctccagccctatgattctgtgtagaaaccacagatttaagaacgctgcacctgcctgaaaactgttgcactgatcccaaagcgttcatattttcaaacactctggatcccactgtttccaggaatggaacaccagagtagcagaggccttttcagtgaggcagctcaggctctggctgaaggtgggcgcaggacactacctgaagcttcaccccaagagatgagggccagctccactcttcccagtcaccgcctgtgggggagggaggctggacagggcatgaaggcagagcctggtggtctgcccctcccatctaggggtggcgcacagaaagggagactccaggccacagctcacttacaccccagaataaccttgccttgagggtgggatggcttgtctgccccaggcctgttggacatttagcaaaagagaagaaaggggaatacaaacaatcctgagcttcccagaaagctttcacacctccaggatgggagagaatgaactagaagagtgaagcttccagtgcttcctcaggtccacagggaaatctggacaggggagagggtaggaatagccgcctcccccgtgagtaatgacacctcctccagcaggctgttatggggatccgattacataatgctacaaaacagttaacacagtgtctggcatttagtgtatgctcacaaaatactagctattgattctttaccaatcctagtcctaactaaccttaaccctgaccaatccaacaccaaccatccttcagtctaataacccagactaactaacttcaacattaaccctaaaactaaccaatctcacctccaatccagaccccagcctattccagctgactggtcaaccctagcaaaccctggtaacaccaattacctgcccccatgcccactggtctgcccccttcagtgtgggctttgtgggactatacttcaggcctgagatcctgctcagagctctctatcaggctgcgccctctcccctcccctctgcccctggcaggggtgaggggtgtctctgtgcttcccgagcagcgtgcaaaagctaagcgagttcctgtccagtgcagagatccgtgaggagcagtgtgccccccatgagcccacacctcagggcccagccagcaagtaccaggcggtggtgagtgcccggcctccccttgctactcccagcatggtcctctaaggcccaaaacttgggcctgctgtgtcggacttctgccttttttcccaggaagaggggctcccttccctacacagctcccagcccagtgggtcctcacctccaaaccacccccagcccctcagggttgtgaaccgcaagcgtccagcccgggaggattgtcggggcctcaccggcccactgcagagcctggtccccagtgcagatggcgatgctgacaactgctgtgtccaggtgagtcctgctgccccatgcctggccacccagcaccaactcccagagggagctcagcacctggaaagccagaaagctgcatgcttagtcctctgcagaggtcaccctgcctgcctgtacggtccataggagtccagaaaccagggaccaccaagtggggggacccccagccttaggcaagggtcagcatgagaaggccagtctcccactcccctgctctggaagtgatccaggggctggaatcagtgtcttttggctttcatggaggaggggaagccagagactattcactgggaactggctgcctttctgttctctcctgggcggtgggacacgcctaatgaagatcatgggaggctacttcacgtggaccccagatggaatccccacactgtccaacatcaccattcgtatcccccgaggtatggcccagtccacccctccagcatgcccctccccatgtcccactgaataacatagagataaaaagacaaagctgcatttattgagcacctactctctgctcattcttggtgtatgccctgggtatattatagaaggggaaggctacattctagaggcttccgtgtgctgggtgggagtgaagcactaaggacagggtaaaattgccagccttaatgtcaaaccatccattgcagacagtataggtaatgcacaaaaagatcagaagtgggtagccaaggaacgcaagtggaagtgatggggtttctgagaatggacaaaggccctgaggccatgaggcaggaggattttctggcagaggcagccatgagcaaagtatggaggtgggttggaggtgggacccaggatggtgtttcttgggaccacaaggagcctgggctcatactaggagcatgggaaaggagaagcgagtgcttaggaagggtggcggggcaggaaatcagagagggggaaggacctggggagccagaggaggatgttgatttccagaaggaaaggattaaagagggagaggacttgctggggattctaggtaggaagaaagaaaacaggggccccagggttgggtgcatctgtctgtctgtctttctgggtaatggttgttcagactcccccggccccactcacatctgccaccctccctccctgcaggccagctgactatgatcgtggggcaggtgggctgcggcaagtcctcgctccttctagccgcactgggggagatgcagaaggtctcaggggctgtcttctggagcaggtaatacatgtatcctcagggcccagtggaggggaaatctccttttaaccatcctcctcagttgaggatgcacacacatttattggagggcccactctgtgttcagtgaggactcaataaatgctgctaatggatattctcatcatcatcactagtacgtattcacctcttactatgcgcaggttctttgctaagtcctttgcatgcattatttcatttaatttttatgataactaacaaggtccatactgttctcaattctcatttatagaggaaggttaaactatttgtcctaattcacacagctaataagtggcagagctggaattgaaactcagttctgtcagactctgaatcccatggttactcagatgcacggcagtaatttcccagtgtgggaaattgcaacaccaacattggtttccagcttggtcctgagctgcactgacctacacaccataagtgggtgttctgaagatccagatgtaaccaataaatgttggtttctgggcaaagatcactgtcttaattaaagagccagaaccccaggctcagtcaatcacgaatctgttatttatacccacctacttccaagaagcacttgaaactagttgatgaaagattcatgtaaaaatcaaaaccacaatgagataccatctcacacccgttagaatggtgatcgttaaaaagtcaggaaacaacaaatgctggagaggatgtggagaaataggaacgcttttacactgttggtgggagtgtaaattagttcaaccattgtggaagacagtgcggtgattcctcaaggatctagaaccagaaataccatttgacccagcaattccattactgggtatatacccaaaggattataaatcattctactataaagacacatgcagacgtatgtttattgcagcactattcacaatagcaaagacttggaaacaacccaaatgcccatcaatgatagactggataaagaaaatgtggcacatatacaccatggaatactatgcagacataaaaaaggttgagttcgtgtcctttgcagggacatggatgaagctggaaactatcattctcagcaaactcacacaggaacagaaaagcaaataccacatgttctcactcataagtgggagttgaacaatgagaacacatggacacagggaggggaacatcacacactggggcctgtctgggggtggggggcaaggggagggatagcattaggagaaatacttaatgtagatgaagggttgatgggtgcagcaaaccaccatggcatgtgtatacctatgtaacaaacctgcacgttctgcacgtatatcccagaacttgaagtataataaaaaaagatgcatgtaaaataaaaccctttaaaaaggtaagaaaataggaactgagaaatgaagagggtaaaaagatgttcagcaacctgggcagaggacaactacagccatcaacataaaacctggctctgtgccctctggtagccaagggaaaaagggatctctgggctttggagtattcatttaggaataaaagttgcagccaatcagcagaagggcaagctttccctaccaatcatttctaggggaaaattattgaaggtgtcaggtttttcataagcatgagtacagaactgagcagggagaaagactttgggcccaatgtctgaatatcaacatgcacccccgtttcctgcatttccaagatgtccctgaatggtgtatccaaaagatggcaaatttccctcctcagtggggtcgtgggctagcagatgagccccttgggtttcccatcacctcccatcagggactgtgatgtctttgggggcagaggggtctttgcctccattcgccattttatttgggagatttttcaacatagcctgactgggaaggcccaggtattcggtttgagatcatattgccttattccgactgcctctccagcctttggagggaggagcccttttctgctgtccaactgcatgcctgcagcaagaagacaagagtccccagtgcactgtgagctgaagaaagtaaccaatatttattgggtacctcctatgggccatgccctttgctaagtgcattgtcaacatgatctcatcaagcctcctactaagtttaggaggggagtgttgttaccccatttcacagaagcagaaactcaggctcagagaagttgggtgacttactagtcagtgtgtggagcagagactctgcccatgttctttccctcaaacctggtcactgctggggcccccagggcctagtcctaagggttattgtccaagccccatgtagtggtcaggctggatctgggctctcctccaaggcagggcttttccagaaggattgcagggctcagacactggagctgcccctgccttgacctgctcagcatggatgtcaaaacccactctgaacctggtccctttgccctgctttcttctcctcccccaccctcatgccctcatgtggcatcgtgcctgcctcaggagctctccttgtcctatgtagatgaagcaggcatgattggcaggggtctgctctgccctgcctcagtccccacctcttctccaagctgtgccaaccctccgggtctgactgctgcccctctctcttaggaaacctctgccccagcccagggaacacaaggagcctctccaaggcagaggaccctaagcacttcttttttttattattttttattttattttaggttctgagatacatgtgcagagtgtgcaggtttgttacatagctatacatgtgccatggtgctttgctgcacctatcaacctgtcatctttttaagccccacatgtattaggtatttgtcctaatgctctccctcctcttgcctcccaccccccgacaggctcggtatgtgatgttcccctccctgtgtccacgtgttctcattgttcaactcccacttatagtgagcacatgtggtggttggttttctgttcctgcctaagcacttattataggccaggcactgtgcaggcacctcatcatctcagtcagtctgcaccgaactctgtgcagtagatattattatatcctcatttatcagattaggaaactgaggtgaagcaagttgtccaaggccacccagctgttaaatggcagaagtgggatttgcacctaggtgctcaagtgcattggtttgccaccatgtgctcaaagagaaggggcacaagagcctcatgaagaaggcatagctagcctgacagtccaaaggccagcagccgctgtggccatgactcacacacacctgcctcctcccagaactgccacgtgggtcctcacagctctgtccttatcaacacttactctcctttacaggtagcctaggccccagctcccagctctgttcgaggctcgcagaggggcggtagtgaaggggtctcatttctccaggatcctctttgctctctcgcccggtcctggtccagcttccctttcaagcatagtgaagtgcatttgttagcttgcagccaaccctgggaaatcatgagaatttgttcccaagtcaactcattctccagcgtccacagtgacgtattcactcacccagttgagcgcctagtgtatactagaccctgtgacagcaacaggagtgcaaaggtgactaagacgtggcccctgctttttttttttttttttttttttgagacggagtctcgccctgttgcccaggctggagtgcagtggtgcgatctcagctcctcacaagctctgcctcctaggttcaagcgattctcctgcttcagcctcccaagtagctgggactacaggtgtacaccaccatgccggctaattttttgtatttttagtagagacggggtttcactatgttggccagggtaatctcgaactcctgacctcatgatccgcccgcctcagcctcccaaagtgctgggattacaggcatgagccaccacccctggccggccccgcttttaagagaggggagagaagacctgggccttagaagagctcagaggaaccacaattgactctgcagtcaaggagaggaggctcactgcggatgtggtatttgagccttgaaggatgagtgtggtttcatcaagtagaaaaggcagggatgggaaagggaggtggtccaggcaggggtgatggtgtgggcaaagccttgctgatattaaagaacatagttctgtgcacctggaacactggatgcatggggtgcattatgaaagatgggactgaagaagtgaacttggcttagatcccatgtagtaggtctgagaagtaagatttaacccaaaggttgcaaaagaaccatgcttgtgataaaggatgatggattggggaaacagagaaaaagacagacagactgtaggaagggaggtattagcaaataatcataacacagtgtgaggtgtgcattaatattcactcattccaagtattgatcaagaagagaggtaggtactgggttaggaaacagcttgggcaaatgcatggggaaatgagagatgtcaagatgcattctaatggcagcctcttgaagatcttaagttgtttttggttcactcatttcgcaaatgaattcatttagcaaaagcactatggatacagtgcttacctctaggaagtaagttttagcccaaatgctgcagaaggatcatgcttatgacaaaggatgatggactggggagagagaaaaagaaaagacagacagactccaggaaggaaggtcagtctgcagctccttatagtggctaggagaaggagtctaggcagatacgactcaattagcttcatctgctgtttgtctctcaaaatctagacatgtgcactgctctggctggcccacctatcctgggcattgagttaagtgtgggggctgtgtgttgagagtccccctccattactggcaggaactccacacctcagacattgagccccaggtctgcagggagaagacgtgcttgcaaagtgagctaaaagcaaaacagcctctgacctggcaagcattcccaagtctgcacgcctgcagccagaggagagggtgatgccaggctgctgctcagatgcttttcagccatacccaggccaagacctggtgaccaggcagccagaaggagttccaggaggcacaaggcaggaagttgggggattaggaggtgtagaatggagaatgctctggggagatgggtgctttgttggtgcaactattcgtttattcctccagtgaccacgtgagcagtatggctgcacacacaggctctgcagccaagctgcctgggttcacatttggtctctgtgctttggaaaatttcataagctttctctaccagtttcccttattacccatgagattgatgtgaggattaacctagcatgtagtaaatatcctataaatattattattcaatagtgtacttctttgccaggaacaaaattcacctgttcctctttaaatgtcctccagtctgtctcctgggaaagattcttgtgagctccctggggacagggaccatattttgtttgtctcactgtatccgtagtgctttttgctaaacgaattcacttgctaaatgaatgaaccaggaacaacttaagaccttcaagaggctgccattataatgcatcttgacatctctctcctttccacatgcctttgtccgagctgtttcctaacccagtatttcactacccctcttctccatcaatatttggaatgagcaaataccgttagtgcatacctcacatggtattataattatttgctaatgcgtctgtctcctccatgactctgagctccttgagggattattccatgttgtaccccaggtgccccatgcagatgtgtattttgtgcactgttctgtgtaggctacaaaggaaaaggcctagcacctgcccttggggagctcacccacccaggatggacagaggtgtgcagacagagctgcagggtgggcacaaagggtccatctgctgaagtcctgcagatgcagccccgagcttgtccctcacgtcagcagcctggctcctggtctcagagagaactgtgtggttcccaagcattcactttaggaagaatcacttgcccctccctggctctctgcttcaaggaactgtgacaaccttgggatttgcaaactctctctttaatccttaagaggaaaatgttttggtaaaaagtcaagattagcagatacactcgggtgaaattctttccctggaaataaagaatagagccattaatatccacagtagagtgactttaaatgcccccggggggtcagcaggaaccagggccctgaggaaaggatcagcgtggggaagaggctcccacttccctgtgaggagctgcacatgcagtctcactggagctccctgctgcaatgctgttgcctgtggtggttggtgtggatgctgcctgccaagagccctgattccccaggaagagagaaaaaggcttctctcaggacggccctggtcgcatctgcctgtacaattcctggagcctttggggagctgaagtcaggggctcaagtgcccctgggtttcctggaggaggcaggtgtggtgagacagctgacagacaggagaagggatgctctgaggaagtgactgtccagccatgggaaccagatggcccctggctgtagtcctgatgctgccacttgctagctctgtgaccttgagcaggttacttcacctctctgagacagactcactgtctggacaatgagtaaaaccctacctttcctgtctcagagatttggcaatgggacccaatgacatcaattggaaaggatgctgtgggtgaaaggtaacctttcaggacagcgacaagcctgtctgggcaggatgaatgggctgtggagccctgtatatcctagctcactctttgaacctcagtttccacttcttccctttttatttattgccggggtcttaaatgagtgttgggggtatctgattctccctctgcctgtacttttggggccaagcactgagctgaaaagacaattcctcctagttctccaagcctacaacctgccccctaaccagctgtgagctgtaatacattctccagtgtcactgtgaggtttgtgccttcacccccattttatagatcaggaaacagaggctcctccaagtaaaggagcttgcctcagatttcacagccaatgagtggaaaagcctctgggattcaaatgtcagagcccatatttttcctacttctcgcacctgttatcatatgctgcctcttcctttaacctgcagttccctcccttcacctccaccgtctcaatccttcccactctttaaggttcagttcagctatgacttcttctatgaggctctactcattttctcagatttcttcctcctccaaatttcttgtaaaaattatgttttttctctgattctaaaagaatgcacattacattagaaaagatacacaagcatacagaagataaaaaccacctaatatcccatcacccagaagcttccagtttttctttatgcatttgcatatgcatttgtgtttacttttccccaaaagttctccgatactttgtcctacttttcttttgacccttataacttcctgacttcggtacctttctgatttgccctaccagagtgtgagcccctggaaggcagcctctgcaccctgattcaggttgccacacatatgccagctcctagtgggctggagggaaggacatgcggttggggaactggaagactcatgctttcagctgtgtgcttcctccctagagtgcaggcagaggaggaatcgaatcccctcagcactcttgtaaagaccacagcaatgagtgagagatggtgcctgccagacataccattctttacttttcagcttaaaacagatacaaagtttggggaggctcactggaggaggcttggggctacactggaaagagaagaacttggattcacaccccagcttcccctcttcccagctctgtcacatttgcaaactctgagtctcagtatcctcatgtgtaaaatggggatagggtttatagggttgtaaggatgagatgatgagttgtttgcaaacaacttctcacagtgcacagtgaaggtcagcaatgagagccagccccgccctttcttctttccaaatgattaatatatctgttaccagcctccattcattatatagctctgtcatgtgctaagcaccatgggggctgaaaaagatgttcttcctgccttaaaattccactggggatgaacaaattacacgggagctgatcagagaggaaggcagtccattatgagggctaattgagcagtgcagaccatgttgcaaactgagttagggcctggagagcttactgtgtgctggggtcctcaggaatgccacagatgcatcaataaccacctctgctactctggaagtagtcacatcaggaagactccagagataagcttatctgggctgtggccacagagctggaatttgtaagctttaggtttctatgtctcatgttaccagcttgtctataaattgtaaattacagccatctgatggttagggaatatgaagtttggttaagagaatgaaatgagaccacgaagattagagaacaggaaaagaggggactggggactacatacccatcagaatcttcattcagtcctgaccctcagcaggagggggatttcatcaggctcatttccatccttgatttcgtccatcctggttctcctgacaaggggcatttatcagagttatggcatgggaaatcacaggggagtaatgtaccatggcatttaagagtatgaacgttggagtcggagctattttctccgctacttactagctgtgtgactttgggcaagttacttagcctttctctgagcctcactttctttatctgtaaagtgagggcgatcagaataaacctccttcatatggttattttgagctttataaagagacaatactggctgagcacggtggctcactgccagtaatcccagcactttaggaggccaaagctggaggatcgcttgagcccaggagttggagaccagcctgggcaacatagggaatgagactcctgtctctacaaaaaatatacaaaaattagtcaggcatggtggtacgtgcctgtaatcccatctactcaggaggctaaggcaggaggatcgcttgagcccaggaggtggaggttgcagtgagccaagatcacgccattgtactccagcctgggcaacaggagtgaaaccctgtctgagagagagagagagagagaaaatactactatggtgcttataaaagttcaataaattttagctgttgttagtattattaaagtaagatctgtatgaaaataaagcagattttttcccccaaatgttcatgtcagaagtatatatttcattggcaaggggctgcttctggaaggttgagaggtatcctgggggaggggatagagcactggcaaaattggcatcacaattcaagtcacctcactcagtgttttttaagttatcaaaatccacagtatgaaaagcatttgacattacagtccactatatttatgcatttataaacaagagaaaaaatcacgaaaaatacagtaccacgtgcagtacacactgattccatctattctttttttttctttttcctcaaatgcacttgccgcctacttattccagacccaatgattgggtccctatccacagtttggaaaacactataagaaatgattgtgtcctctcactttccctctctgggatttagttttccaactataaaatgctcctgatgcccagccagcctcaccgctgctccgagtcaatgccaggaacgctgatttagcacatgctatttggagggtacccatccaggtgctgtgggagggacagagattgagaagagtgctttctgaccccacagaggccatttggaaaccctgggaatgggtgggagggttggaggtggggattgcttctcccctaagactcagcgtgatggaaaggcaatggggtgggaactaactggtgttggtctgtcccatttgtgtcccagcagccttcctgacagcgagataggagaggaccccaggtacagccttgggactgggtcagaagtgggtctcaacaaagggaaggggtagggtgggggtggaggacttgtgggtgggtaatgctgagtatggattcagggatgtgcagcctacatattttcagagacatggggctaaggcctgcattctcaatgagggcaaaatttggttcttggggacagaaaacacttagacattgcaatgctttgtggctgtccaaagtaccaaacagatgccagtatatctgtggtgctgaaatttcatggtgaatggagtcagaaaatagactagcgattgccagggtctggtgggagagagagggaagggactgccaatgtgtatgggatttgttttggggaagataaaaatgttttggaattagatagtggagatagttgcacaacctggtgaacgtacttttagtttcagaggttttctaaacctctgatttttttttaagtgacaggaaagacagaaaaaagtatatctaaaaaggctctaggggtgatcatggaaaagaaagttaagaaatatgactgtaaggaaaggagatgggtgtccctcaggccaggcagaaaattcagtcttgttgctttatgttcatgtgcaaatctaaaaaatccaagtgatatagattaatgaggctctgagtccctcaaaaccttccctccccttacctctccaaaaaacacttgagataccctagaggtggtatgaagtcaggatgggaaggttggctcagctttgcaaataagtttaagcctctggcctttgctctccaacaccaaagaggcttcactttggtatattttctctgccctttctccctccttgtccccaactgtcagtatgtgatgacaggctcagcctctgtaatggtagtgatcatatttcttgagccaaaaatcagacctcatggcatgtgacaagtttgcatatgtggatgagaacagagtggcagaatatttgacacgggagcagcttgggcagtccagggcacatggcactgcacctgacatccctggcagatcccccacattccgtggttgtcttctgatggggccatatggggctgcagatcatgcctggagccctcgcagctccagggctgcgggttcccagccccagagtgcaggtgctggtgtcagcctgcctggcctggcctggctctgtccagagcactccttgccccagctgtttgtgcagctgtatcagcctcagacctcagcctattcattccaacctgaatgcagaggctgggtctggaggagccacattgcgggcttcatactcctgatctgacaagttttccccccagagcctgcaccaatggcacctctccccattctccctcttaactgggtcctccagggccctcctcacacacccacgtggtcaggcagcagaggcttccccaagatgggcacaccccactctccacacctctctatgcagcatttgtggctacagactgggtccaggggattgtaaaggcatgctcatgttgggttggagggagctcaggatcttcctggaggatatggttcactcccatgagagctcagtatgcctttcctcccctgctgcagcccagagcgggagacagcgaccgacttggatatcaggtactgcgtcctgggaacattgccccccagggtcaactccctccagggtgctctcaggcccaagggagccacatcaccctgctgggcagcccccagaccccagccccagtgttgggggaggccagggagggcccctgtgctccaccaggtggctcgggagctgctgctgtttctgtgcatccatttactcccttcacataagatcatttttatctgggatctctttttcttttttcttcaaaaaccacatcactcaaaatgtggcttccttggctctgcttttaaaaaaaaaaaaaaaagttcttccatttggagaattacctgctgacttcaaagtccagtggcttgagggctacccaaagagggaggaagccagaagttgagtgttcccttggtttggtcacacttttgggctcctccctgactaaggaacaacagactgcagggctggggcaggctgggtgtagggcagggaggggatgaggtcctgctgccccagtcagttgagacccagacctctcaaacctgcctgggggaaggcaaggccaccagaggccacactaagcagatttctaccaactgcacctccccatccccttgcctccatctgagccatcagcttgacaactgcctctgagaacaagcccctgagaatgccttccgcaccccctactcccgccctgctttttccaggaagagaggccccgtggcctatgcttcgcagaaaccatggctgctaaatgccactgtggaggagaacatcatctttgagagtcccttcaacaaacaacggtaaaagcctgtcggagggaggcaggatgtggaggggaggaactgtctctggccagcctgccccagttccgggcccctccatcgatcacccacacccagccatctcactccccaggtgcttacctgcactccagcctctccatatggtgcacctggagaggggccaggtgtgcctgagcattggggcaatccagctcccataggggagagggcaggaatggagggaagggagagagccccgctgccttttctctagctggtgggagggctagctagctctctctgtgagtctccattcgcctggctcctgcactattttccctccaatgataatagttagggctagcatcgactgcgctcttactacataccaggcacagtgccgagctctttgtacacggaatttcctctcatgcttacaacaacctcagtaggtagatattattgttattcccactctacagatgaagaaccaagtttcagaaaggtcccaaggccacccagccagtaagtgaccaagatgggtctcaaatccaaagctgcctaacacctaagtacatgtttgtcaccaacatactctgatgcctccatgaactctggctggcacctgcccaggctaagggctggctggggaagtatgagaggaacaggctgggcaaatatttgaccagccatcatcattactgcctaaaccaaccagcagtggttttccctgcagtgccccaagcacgggttccggctgcagcttttcccactgcacagagatcatgagcgccctttcatcacttactctgcatatttgttcccaaccaattccatccttctagtatttaacctgcccaaacgctgtgtgaagtgctgacctcagctcttttcaagctcacacggtgtttgcttgcacccaagcgggaggcctattaaagccattgctcaccctgggcatagctacccagagactaatgaccctctgcaagtgctcgggccaactctgaccaggctgaccagctgcatcccctgcctctacccacgccaggtacaagatggtcattgaagcctgctctctgcagccagacatcgacatcctgccccatggagaccagacccagattggggaacgggttagtagcagcctctgaggggttttttcaaagccaggacccccaacctaccatgccctgagacactactcaggacaatgggtaactaggaaataggagacattgaaggctgaagagttgcctgcagtaaggtcaaacatgttgttcttgatgatgtcctttgacaggttttcagtcctgcttggagggcaaggtcagcttagtgccctcccaggctggggatcttcttcatttgcaccccaggtatacactgagagcccacacagcactgtgctcagcctggggttgtattgttcctgttcatcctccagatggggtcccctccacaagcttagacgaacaggattctcctgtgactgtcctccttttgtgtgattttaatccctgctgcctctgtctttgtttgtactggtcagatggtccctagcgcctacacaatgaatctttaaagacttggggctcatgctgccctcttctgaatgaattcagtaaacacgtgcaagttccttctctatgcaaggtgagaagcaggcaaagaagtggatagagccaggcctccatcccaaagagctcatagtccagtagggtacaggacagtgtctcctgaatggctgagggcatgatgtgttcctcctctttggtgacagggcatcaacctgtctggtggtcaacgccagcgaatcagtgtggcccgagccctctaccagcacgccaacgttgtcttcttggtgagtgcaagttcccttggggtcctggtctctggctgcctcccaggcctaactgcccacctccacctccccgcaaccccaccatcatccaacaatctccctctccaggagtaaatccctcctgccagagatattgccttatcatcctagtgatagggaaactgaggcaggcaaggatagcacaaatgacccattgcagacttcagatggagctctgcagtagccaatgaggagaggcaagctgtagttataggctgcctgtctgtgggacagcccaacccctcaacacttatgcagcccgactataagaatggctgataacagaatgtgtgctgccacttcccatcttatgcccagtgcagacattgctaattgttcacagcattatttcccatggaacttaactcatcctcagaatccttctcaacacagcactccaggtaaccactagccatcaaacatgagataaaactaggccaggcgcggtggctcacgcctgttattccagcactttgggaggccgaggcaggcggatcacgaggtcgggagatcgagaccatcctggccaacacggtgaaaccccgtctctactaaaaatacaaaaaattagctgggtgcggtggcgggcgcctgtagtcccagctactccggaggctgaggcaggagaatggcgtgaacccgggaggcggagcttgcagcgagccgagatcgcaccactgcactccagcctggggacaaaccgagactttgtctcaaaaaaaaaaaaaaaaaaaagaacgtattcgcaatccttacactacttcatgtcaagttctgttgtgtcaggtgccttgactgacactgaagaattctaagaaccagtccttggcctcaaagatttagaatctgattagggagacagagctcacccagttcaagaggcccagcccggttcaaatccaaactgtgcggcataaactatgagggggccttgtccagggagacaactgtgagggctggagtaatcagggagggcttcctggaggagagcctcaaagggagagtcaattaaacagaaggaaagagggaggccatttgcacagtgagttggaagaaggaagctcaagtctctgattccagctttattccctcccctctccctacaccacacgcacaagcactcctttactaaagacacttcacagtgggaagattcagtctccgttaccgtctgacacacacacagcgttttacaaagcatgggtgcattcgcgatctctcatgagatttaaacaaccctgctagagaaaagtgaagtggacattttatttcagtaaacgtttatgaagcgtctactctgtgccaggcactaaacgtttatgaagcgtctactctgtgccaggcacaggcacaagaagtctcagttcttgggagtgccataatcaggaatggacaaacaatgatcagatctggctttgcgccagtgtcacgggaatagggaggaaggaagggtaggcgtgggggtcaggacaggatgcaggaggaactggtgcttaggtgagcgaaggatgggtgggagttcacaaggcagacaaaaggcagagcagcactccaggcagaggaacagctcaggagaaggcccagacggcaggcttcctgggaacctggaatgcagagtgctgggaaagcacagatgaagcatgagtctagaagggaaagcgagaggttataaagcacctggaacaccagcccacagggtttgactttagagatgatggggagccgttgaaggtccaggagtcaggcagtgaagtgattagatctgtttgagagtgatatctgacaactgccccattttaaatgaggtaaccaaggcccagagaggttgggtgagttgtccaaagccacacagctaactagcttcagtccctagagcagagttgatagaactctaatgggttttatactcattgtcacccctccccaccatgcctttccctaccctctactctcttcctctcccttctgcccaggatgaccccttctcagctctggatatccatctgagtgaccacttaatgcaggccggcatccttgagctgctccgggacgacaagaggacagtggtcttagtgacccacaagctacagtacctgccccatgcagactgggtgagggggaacaagggggtcaggctatagggggcagggctggggaggctgtcaggcatcttggcaggaaccaatccgttgtcttggtagcaactgctgagggccacaaagcataagagaccagcactggatggctttatgcatgctgggcatttcagggagaccctgtacaggccaggggtttggtatcacctagacccacagacactccccatcctggcccgggccccccatggtacactcaaggctggcaccaagaagtctcaggaataatcaagtgctcacttctcaccttctgattcctgcccttttgatgacccatccccgcagtcatggggagtgcccatttggatggaaaagccctcttcccaccctatgaccttcccggggtggatggatgcaccaccccgggaatcatatgggaaatatggaaccaaacaatagcagtagtaatagaaacttcaggctgggcgcaggggctcacacctgtaatcccagcactttgggaggccaggacaagaggatcacttgagcccagaagtttaaggctgctgtgaaccatgatcatgccactgcactccactacagcctgggcgacagagccttgtctctgaaaatttgaaaaaggaaagaaagaaagaaagaaacttcaatattatcagtagagtccaatgttgtgaaacccctcattaactaaatttccatactcttcagtaggtagaaaataattactttttgattcattagaaagcacttaatttttaagatggagatcatgtaattttgaactctaggtcttgcctactcctatataaattctcctctaaacaacagccaaaattgaggccctctttgagcttcaggctggtgccaaatggctctgcttattttccccaaaataaatcttccttccatgtatgatgagaccccctccagtataaagaagacccaaagaaaatcacccaaagaaaaaaggcccaaagataagacccaaagacctaaagatttaaatatatatacagatacagaaggtttgtttctgagtttctgtagtgaccttggcaataccttgtagttcaggacaatcctgaggaacacagaagtgctggcttccttgaggaatcagtgatcaggactctcgagccccttgaaccccagcatagggcgggagggggtgagggcagcaggggtgggtgtctgaattaatgtcaggtctacgtgatggtgtcatcaagtgttccagataaaaagttttattgagccgggcgcggtggctaatgcctgtaatcccagcaccttgggaggccaaggcgggtggattgcttgagcccaggagttcgagaccagcttggggcaacatggtgaaaccctatctctataaaaaaaaaaaaaaaaattagccaggtatggtggcgtgcacctgtggtcccagctactcaggaggctgaggcaggaggatggcttgagccaggaagcagagattgcagtgagctgagatggtgccattgcaccccagcctaggcaacagagtgagaccctgtctcaaaaaaaaaaaaaaaaaaagatttattgattccaaagaggcatggccacacacacttagaccagcaggtgctttgctaagccctgatggaggctgccagacccgccgtcaagaggagctaagggtagtgtacaatgagcccacttagtgtatgacggccgctgccgtgggtggagtccttgtgagtaaccagccagcttgagcaggatgcactaatttgctctgcaaacccagccattgagaaatacgcctcagatgtaccgaactctaggtcctaggagtatgttggttggggtaggttatcaataccagcccacttgcagtggatgagctggtggccatttgtagtgaggaaagggatgtgtcaacctccatcttagactccacaattgagggatgtgaccaccattcctccccagccagcccccaaaccacgtttgttgctgcctttccagatcattgccatgaaggatggcaccatccagagggagggtaccctcaaggacttccagaggtctgaatgccagctctttgagcactggaagaccctcatgaaccgacaggaccaagagctggagaaggtgggtatatccagggatggccaagcagccacccctggatgcaaaggttctgctagaacctgaactcataaaggtcttcctgtccttagtgccccaggaagccccctaaagggcagatgtgggagctgggcatgaactggctcctaccagaggagagacagtacctgtgccaggtgcccagggcagaatcaggtgggcaccttcgccttatcctgaggtagtcagatactatttagttgcaaagtttcagaaaatcaactcaaactggcaaagaaaactaagcaaagaaaacaagagggaattaaggatttattgacccatgaaaccaaaaagtccaggtgtgtcatagctttaagtgtgctggatccaggtagtcagtgtaatcagaaatctgtttctcccatctcttgactctgctcccctcaaattggctcagctcccctcaaattggctccattctcatggtatcagtgagggccaccagcagtcttaggtttacattctcccagctcaacaactctgccagaaaaaaagtgcctctttccccatagttcagcaaaagtcccagggctgagtctcactggtccagtttggtcatgtgcccacccctgaacaaatcactgtggccagcggtgtggaatgtgaggattggcctgtcctgggtcacgtgccactttgggagccagatccacctgaatcacagagactaaaaacaggggaagagtggttccccacagggatatgggggtgctattatctgatgaaggggaaggactaaatcctggcaagatgaatgtgtgtctgtctgcccctccctcaggcagggacaaagtagaaatctgacattggtcatcaccagagtagttaccccttaacttccccttcccccaccaaccatatatcctgaagacattgcccaggccacatctgtcttttaggagactgtcacagagagaaaagccacagagccaccccagggcctatctcgtgccatgtcctcgagggatggccttctgcaggatgaggaagaggaggaaggtacaggcaatgggactgggagtgaaattatggcctgaggtctgatcagccacagagaggctaaggtttggggttctgggtgtggtgcagtagtgtgcctttgattaaatggcttccctctgtgtgcccccgttgtcccctcagtaagtggggataaaatgccctgattcaccctcagagggatggaaatgtgtagccacagagtgggttcttgcggcctgcagaggaggcagctgagagcgaggaggatgacaacctgtcgtccatgctgcaccagcgtgctgagatcccatggcgagcctgcgccaagtacctgtcctccgccggcatcctgctcctgtcgttgctggtcttctcacagctgctcaagcacatggtcctggtggccatcgactactggctggccaagtggaccgacagcgccctgaccctgacccctgcagccaggaactgctccctcagccaggtgtgactggcggcccatggcagaggttgggagtggggatgggggaagggctgagcccatgggcaccctggaactccaaatcactctctgcctgtgaaggagtgcaccctcgaccagactgtctatgccatggtgttcacggtgctctgcagcctgggcattgtgctgtgcctcgtcacgtctgtcactgtggagtggacagggctgaaggtggccaagagactgcaccgcagcctgctaaaccggatcatcctagcccccatgaggtacccgtctcccctggccaggctgggactgtgagcaagtcactgttctctgagccttagtcttcccatctataaaatggggatatacaacctgtcacaagcttgtgggggtgactcaaggagacagtgtgtgtaaaagtgccctccttgtgcaagaagcagggagaaactggcatttactcagccagatactgtgataggcattgtgtgtggttagctcatttaattgttaccatggccctttaaagtgagcgtctgcacatccaagtaaagattgttttctcctccctaagtgggtgtaatttgcccatccccacccatgagttcagctccctgccctcccctcactctctctccctcagccagcctcaggttttgacactgggggaacaggtagctgttctattaataatttcctgtaatgggatggataaaaatctcaaaggccacttgatgtcaaagaggtttaaagttgtccctgcccaattggttggccaacttggcttaaaaacacaacaggcaaacagattttctggccccttgtcgaggctagacctcacaatctaactgcactttttactttccagcctcatgagttttctgtggcccacagatatggcctccaagtttatttacttttactctctatttgccccagctctgtagttctgaaactccctggttggggttgggctgactctgggtcagccagccggcaggctgtccccagggccctgttcctcttggcaggttgtccctctggagaggactctgtgtcccaggaggacagctgctgagtcaggccgagccggcagctgagaaaggcggcagtcgtcagatgggcttgagaaactgaaaggctaacgaaaggccagcgcccctttgggcagctgcaggaattcacggggatacaggccagatgtctacaaattggcagaggatgccagacccatgaatgactccagagacacttacatgaaataattaactatctcattcagtaaacaggaagtaaatcaatggacaaatgagtaactcttcctctggctgcctcttaggttttttgagaccacgccccttgggagcatcctgaacagattttcatctgactgtaacaccatcgaccaggtacagaggaccgtgccacactatccccccttccagagacacctcggacccctgggggcttctcctgtctgaggctgggttccccagatcaggtgatcacagccctctgggaagaagccagtgtccccgatccgattataatgctgcttcagggctggggcctccctcgtgggagcctcacagtaaggctgagggaaaccagatccctttagcttccacctgagatcccactggctttctctagtaaagttccagcatattctgaaccaaggtggctgattgtatggagaatattcattttgattcagcctgtgttctttatttaccattgtaccagatggtgtgaaaacaaaatcttgattcctacctcagggagtttaccttgtagctggagagatgagatacgtgcctataataaagggagagcaaggccgggctcagtggctcactcctgtaaccccagcactttgggaggcggaggcaggcggatcacttgaggccaggtgttcaagaccagcctgatggccaacatgatgaaaccccttctctattaaaaatacaaaaattagccaggtgtggtggcaggtgcctgtaatcccaactacttgggaagctgaggcaggagaatcatttgaacccaaggggcagaggctgccgtgaaccgagattacgctgctgcactcaagtctgggcaacagtgagactcagtctcaaaaaaataaaggatcaaaaaataaagtgagagcaaaacatggcggccagtagcactctaaacacagtcaataccaaaattcacctcactctctccccctcgtctccctcagcacatcccatccacgctggagtgcctgagccgctccaccctgctctgtgtctcagccctggccgtcatctcctatgtcacacctgtgttcctcgtggccctcttgcccctggccatcgtgtgctacttcatccagaagtacttccgggtggcgtccaggtgatggcctcaggggtgaggggtgggaggtgctttgcaatgtgcagtttggtgtacttgctagactcatcgttatgagagtaatagggtcgtgttccctccaaaaaataaaaacaaaaaacagaaatgaaggaaatagaaatatccacatcttattccaccgccctaatataatagtctgccaacacacgcacacactgaggttgacatctgaattatttccttgggcgatatggtcaggactggaattgctaggtcatgataaatgcacattttatgcccttcattcattttgccaacatgcttcccaggagggttgcatcattctagtggtcaggctgattgctgatgcatgaaatcggcgggcacctgattcaagcagtgttatgataacacctcccagcccacgtgagtccagagtgtagctgtaagccttgacttgagggagcctctcacagccattctcatggatcacatttgccctcatgagctttggatccatgcacgcctctttcctcctcaaaattttctaagaatgttctctagggagttctttctgggagtgattctcccagattcatagaaactcatagattcaaaaaattgtaggaaaaaatttaaagaacgtctaggccagtgtttctcaaactgccaattacagcccatcagtgggtcatgaaatcaatatcatggatcacaaccagcatttttttaaaaatgaaaaaaacatcagactgtattcatagagtaaagcaagctttgcttcatgaaacctttgtgttggtcatggaggtgtgtgagtactgatttgtgagataaaatatatttctgactgcaggttgtggtcagaaaggttaagtacctttcccaagtgcacatagttggctagaaactagagttgagatacttattagcaataataaaatttagatgcattttggacacaattacctgccccaaaggatcaacatttgtataaatggctttttgcttggatgatccagaatggcccgacacccacacgaacaacatagctttttgacactcaaaaaattcaaagtgctgcacaagctgttctacaaagttcatttcttctgccagagaaacagcccagtctctgtggcacccagtctgaccctggagatggtttatcagggaaatcaacttcctgcatcccaaactggcctccctggcactgatgtgcttgtcgaggtgcagctttggggagcaggaggcaattctgttgccatggaaacctctggccttaccccgagacgaaacctatcatttcagcacatcactggccagggtctaaagagctccttgatggggtaagcggaagacggggttgaacgctttgagtttggtcttctgttcctttggccagctgtctcaaggttcagattgttcacctgtaaaatggaactagcactgcctgcccagccttagctcagctccaggctgtgcagcagaagtacagggacagatggcgacctggggttgacaatgcccaggacagcagtaattgtgccccacatcaggctgtgtctaagcattgtacataaacgatctcattcagtgctcacaaaagctcaatgggctggtggcattgtcttcccccttcacggggtaagaagctgaggcctagagaggtaaggccattcacccacacagcggtagcaggtggagctaggcttcaggcccaggccgagccctgagcctgccctcttaactgttccactctgttccccgccacagggacctgcagcagctggatgacaccacccagcttccacttctctcacactttgccgaaaccgtagaaggactcaccaccatccgggccttcaggtacgagtccacattcccccaaggtaggagtggaacaggggtggggccagggggcacaggccatgagatttgattctcaggactccacttgggaaggccaaggacacgttctctctcaagctgcctcaggtcccaaggcccaagggatatccaccagcagggacaggccaggtgggctcccactgaatgttctagagaggaaaattccagctctgtagacaagcccaggacctctgtgaggcagagcatgaaaagagacaaagctgggacaagtcttcatgtatcaacgctagaaagggccttaggtgcgggccaccctaagcccttcttttattaaggagcccctgtgtgccaaacactatgctgagtactgtacaggccaatcccactcattctgcactgcaaccctcggtgctgagaatggtcatttccattgcacagacaaggaaactgaggcacagagacgttctataacctctctgtgtaaggtgccacaaagcccagacttgaacctatttgttcatgcaacaaacatttactaagccccgactatgtgctaagccccatgccaggcactaaaaagatgagtcaaataagccgctgccctgcaggcgtttacagcccagactttgagcaggccaggataaatccacgtgacaagtattctgaaaaaagcggattcaagggctgtgggagcatagaagagagacagtccgggaaggtttttgtaccagaggtgtcatcagaactaggactcaaaggaggggcaggagttcaccaggctgaggaattcctgaaaacttcagtgcccctgccatcgtctcactaccctgagtggtgatgttggggtggacaggagcatctgaggttgcctggggaatgagggaagctgttgtttcccactccccaagagtctgtctgatctccagaggcatctctcttccagtcaggcaggccagagacccctgacacacaaagttgggctcttttctcatcttcatccagagagtgataataggttatttttagggtggcacagctgcacgaagtatgacagtaaccatgagacaccaagcactgtgtccaggagtaaccatagggcacaaggaccagccaagggccagagaggcttacatctcctccccccaacccctgaagtccagcttcagccctggagaggtatccaggcccctctgcccaccctggagcacctagggccagtggaaatccacctcttagggatcttgtctaagtaaagaagagcagagcaaagctctgccctggccttggcgctgctccctggacatcccttgcccctggacaagcctatgctgtgtcttccacaaagaagcttgctggggactggattatgactctagagtctcctcccagcctcctcttctcaagcctgaacttctcccgttccttcaacttccaggtccctcgacattactgagcctagcctttgctctaagttttggtgatttccctctctcaattggtgtctcagagggccctggggtagagagatggtgactcttctagagtgggccacagccccttgtgtgcagatcccagcttcctgtaaacagcctcagatcaggccaaacctgtggtcagccagagccactgctacccagtgaggtcttccacaccctactgacacggtgaatgatttttaaatttgaatgaaaggctttttaatcaaccccatacacatttaatgcattggctttaatccagcagcctgttgagagctattagcacttattgattgcccacttactgtatgccaggcaccgtgctaagtgttgtatgtgcattattacatttaatcctcacaaggaccacataacataggtacgaatcgccacattctccagatgcagaagcgagacccagagaggctgggtaatcaatccaaggtcacacagactgcgggggctggcgctgagcttggaacccaggtttgcctgaccttctgggctttcctaagagatcttattttttcccaaaagagtttcaagagtgcccagcactgggctcagtggcgggctcggaggttgttttcgttcatgtaggaactatcacttccccatttttttcataagaaaactgagtctcagtcctgatacacagccaggaagttgtgatgttcaggctccaacctgggtttacatggctccgaggctggggctcttttctagtcctcagacacactgtcgcacgcctgtggcagaagctcccatctcacacttgccgaccctcaactcacacagtcctgagacccacatacgctgagcgcctcacactcctataacacgcacatgccctgatgcacacacattttcaacacgcacttactctacccttcaggcatggtttcacactcactgcagacacgtcaccctcccacacgtctccaccctgggggtgtgcagtagcatgctctctcccacctcagaacctcccttcagtcccctcagacacatgccctctctccacgcagagacaatcaaagctgaactaacaccttccagggtgaaaagcaaatgcccagtaaggtacgtcttgggtgcctccgtgtcccctgagtttggtcctatcaaaccagcgatgatgaggcagcttttctttcgttccttcctccatcatcaaacaagtgctcctgcatctcctctgggccgggcctacgtcagcaaggtctgagggaagcggccaaggagagtgatgacggcagcccaggttgatcagagaaaggaggcaggtccatgcgcagtaactcagggaaaacatgatgaggacctaaggatgagaaagaagcctccagagttccctgtgcagagagattccatcaatttcagagggtcaggggagtgccatgcattcatccaacaaatatttattgatagtgccaggtgctggggtatattggtgaataaaacatcttcatggaatttgcagtctattgagggagatgattataaatagctagagaaatgcatgtacagcagatactgtggagcaaacaggttgcagacaataataggggaaacctactttatagtaaggtagtagccaggaagagcctctctgaggaggcagcatttaaggcaagccctgaaggttgagttgagccagccttatgaagagcaagggcaaaagccttccaggaaaagggaatagtgtgtgcaaaggccctggggtagggaagactttagtattgtcacagagcttttaaaaagctgagtggctgcagcatagtgtgtggggtgtttgtggcaggaattaggttggcaggagggggttcttcatcctataagcagtggaaggtcattaatattcttttttatttgtttttttttttttttttttttttttttttgaggcagagtctcactttgtcacccaggctggagtgcagtgaggtgatcttggctcactgcaacctccacctcccgggttcaagcaattatcctggcttcctcagcctcccaagtagctgggattacaggtgtgcaccaccatgcccagctactaatttttgtattattagtagagacagaattccaccatgttggccaggctggtcttgaactcttgacctcaggtgatccgcccgcctcagcctcccaaagtgctgggattacaggggtgagtcaccgcatccggccggagatcattaatattctaaacagtgggggagaggacacagtttgcgatttagatagattaagccagccactgtgtggagcatggactgtagggagacagcaggtagacgtattcaggaagctgatgcagtagtccaggtgagagtttgtggtgggcaggaagcaggatagagggggagggaggcaaggactcttttagagagagacataagaggacttgccaaggggctgaatgtgaatccaggtgattcctgggtgagaaactgggtaaagggaggtgccccttattataatgggaaagacctagagaaaatggatcttggggtgaaaacaagagtttggaggaggtggggattctggacaggtttgaataagcagaaaggagtggggtggacattccagagagggatagcttacatgaagtggccacggtggcatgtctggggactggaggggccctggagcctccctctgcaggtagggagactcctaggagctatgtggaccaacactgttcccttaggagcttctcatcctccctccaggtatgaggcccggttccagcagaagcttctcgaatacacagactccaacaacattgcttccctcttcctcacagctgccaacagatggctggaagtccgaatggcaagtgctattcccctctaccctggcctctgataggagggtggggccagagcaagagcacacaggtacctggggatgaaagagaggataggataccagatcgtgtggacaccaagccttcctgcttcccccagccctggtggtcctcctagtgtctagcctgtgctccttttccccatatcactgcctggaggcttgtgtatctgaggtgtgtgccagtggcaagaacagttgtggtgaatgtgtatctgcagtgggtcatatgacacccacattgtgtgtgtttgtgggccagctgaggcgtgcatgttaaagggtgtgcaggggctagggggtaggggagcatgagcttgtgggacatgttggctcctggggctccagccttcgcagcccttgtgtgtgtctggtgacgtgtgcatgagttgcagggctggagtggaggcctggctgagctgctctctgccccgaaaaggagtgaggtagaacaggggcctgtggctctaacccctgagcgcccaggtcagctcctctccctccccaggagtacatcggtgcatgtgtggtgctcatcgcagcggtgacctccatctccaactccctgcacagggagctctctgctggcctggtgggcctgggccttacctacgccctaatggtgagcggcagtgggctagggcagaggaggggtcagacaccagcactcccggagcaccttcgtcactggagacatgagacactcccaggccttaccccaatttcatttgcatctgatgccagagggacagtgcgggcaggaaggctgaccagcaggccccagggcccaggccccagacaggtggaggttggggagccacatgactgaccctccctgtgcctccagggagggctgctctgagcaggcagtggatggcagcaaaaggaatctggggccctggcccctctccagccttaagaagagccattctggtggctgaggacagaactaagcgaccatggagtgtgcgccactggcttgctccccacaggtctccaactacctcaactggatggtgaggaacctggcagacatggagctccagctgggggctgtgaagcgcatccatgggctcctgaaaaccgaggcagagagctacgaggggctcctgggtgagaggctcagggagaggggtggggaagagtccaaggaggagtgtgtctgggttgggggccacaagggagcctggggatggggtggcactttcggatactagctgtggcccatgcctggtggctgagcccagcccggcccccagcaccatcgctgatcccaaagaactggccagaccaagggaagatccagatccagaacctgagcgtgcgctacgacagctccctgaagccggtgctgaagcacgtcaatgccctcatcgcccctggacagaaggtcagagcacgggcccaacccaatgctgcaggacaggcgtgagcaggggatggggcatgcacggagctggatggcttcgcagtcacctcgtggccctccagggccgaggcctctcactattcagacatcgcagtctcctgccctgggcctgtgggggcccatctttcctctccttctattgccttcccccagtgctgccctcaggccttgtcttctcactcatccaccaaggagaccgacactctggactcccccagctcacacgggctttgtcagggcctccctctctgcgaatggtcaggggctttccctagggcactgccccgagcttcagggcagggacctgggggcagacagcgaggccacccttgtattgagggtgagcccctgcctatggccctggcccagctctcctctcgtttcccactctgtctctttgtctctgtctcactttgctgtggctgtccatgtcattctctgaccttgggatgtacctctgtccctgcctctctcatccttctatgtcactatctgtctccgtattgtaatttctgttggtacccaagtgccaggaagcaacgggatcagaggtggctccattgtagggcggggcacacagacacatccatgcataccactctcagctgcccctgtgtcctcctgccacacccatgcccatagagacacaccactgccccccagctctccttcagccaagtacccggcacacccagacccacaccaaggcccaggcaaatggacatccatgcctgcacttgcgtgccggtccctgtgtaagccctctctggacccactgcaggaaacaagcccaaacctgtggtgtccaaagagaaactagtcagaaaaccaggccaaaaagataccctgtgacctcccacacctgcacacacacccagagctagcatagaggctattcccagcagccccagagtcccagtggcggtgcctgcttctctctttccagatcgggatctgcggccgcaccggcagtgggaagtcctccttctctcttgccttcttccgcatggtggacacgttcgaaggtgagttgtaaggcgggcaccccacgtgtacccacagccaccagatgaggcctcagccctggcacgtggtcagacatgacaggaggcccagcagtcaccgccttcccctgcaccctcactgggacccatgcagggcacatcatcattgatggcattgacatcgccaaactgccgctgcacaccctgcgctcacgcctctccatcatcctgcaggaccccgtcctcttcagcggcaccatccggtgagccccaccacccctcaggcccacccagccccaggccggctcagttccatcagatctggagcacaaagaggagggggttgggggagaccaggatcccagaggtgtttcctgctcatgcccttctccatcccatcaggcccaggcagcctctggaaggggatcccccacccatgggtctaagatgctgtcccccacccactgccaccacctcggtgcttctcccagccagacctccaactcagtctgctctcgctcactgccctctttgccgcctggggatgcaggcaggaccctgctccctccctactggggctttctgtgccacttccagatttaacctggaccctgagaggaagtgctcagatagcacactgtgggaggccctggaaatcgcccagctgaagctggtggtgaaggcactgccaggaggcctcggtaactactcctggctatgcagctgggttggttgggcactcaaggaccctgtaaggatggcagacagaagcccgtgtctcaggtttgccccaagtttggagtctgaagcctggcaggaccatttagtcctacttctcactatacgggggcccagagaggtcaggtgtcttgccccaggtcacacaactggtcagttcagggtctggctcctcctgcagggtacagcgggtacagtcagggatccttgtgagacagagattgcgagtcccccatgccaagggggcatcttcagccctgccctgccccatccacctgcatgcccagttctgccttaggggaggagaagatggactgggcaatcatagacacgggtcactcatcaaggccaccggtgattggcaaagccttggtatatttgctgcagctcctggagcattgggggtggccaagccttggtttcaatgaatcaccctaccaaggccctacatacacactcagtgcacccctcagtgcacacgccccctcccagaactgcccagggccacagcagcacacacctccaggggtgcccttctcgttgcagtccttgcagacggcctccacattgttgtgtcaggtgcaccagccctgcacacgcctgtgctcttggacacacacccacctatttgcccccatgcacacattttccaacagccccccaagccatcccatctgctccactcacagcacaagattaactcagtcctacttcatctccccgggctgttttcagatgccatcatcacagaaggcggggagaatttcagccagggacagaggcagctgttctgcctggcccgggccttcgtgaggaagaccagcatcttcatcatggacgaggccacggcttccattgacatggccacggttggtcctgggcccctccatgggaccatggtcttggaaagggtttagtgggatgctagggagaaatttgcacgaagtagtcctgaggctcaagttgcctctaacatcaaatgctatgtgttgcagaaaatgaaaagagctggggggaccctgactctgtctagtcttagggaatgttacacacacacacgcacacacaaaaacactatgcaaacacacacataagctgcacacacagacccacacagacttcacactgtcacctatcacaacagcacacacacagccacaaccacaacctacatacacacacagagctgagctcccaacaggctgagtccagtccctgagtgccgggaacctgttcagtcctgtggggtgggggtgggactaggatcggggtcagatgggagctgagccacagacctgggctccacatcccccaagccaggccagaccccatccactgggcaggtgagccaacagctgttgcccccacttggcaggaaaacatcctccaaaaggtggtgatgacagccttcgcagaccgcactgtggtcaccatcgcggtaaggggcccattgatggggtgcagagggacacccagggacaggactggcctgttgtggccgtcatcagtgcacagcccctgggcttgcctggtcccagtaatcaagaaagaaccctgaagcaggcagttcagggcaaggggcctggagggcatgcagggagcctgggttgcaggatttggggtggggggttttgcccctgtgcttccctcagacctcccctctccttctccaggttccaaggcctgcccctgtcccaaggccttatatgttaggctggcgttacttctccataggaagtgggggaggggttgtggagggtctctgagccttgaagcctggaggtggggtagagttgggacttggagaggagagaagggtggtattagcagatggagagcttgtagtcacatccaccccaggaaagtgcagtccccacagtgacaggacattctggccacatgcctcatcctcctcctccaagccgcaggagggccaccctcagctgtggcccccaccgcgggtggtattcccaccatcctgacccgccccctcctgccctgcccagcatcgagtgcacaccatcctgagtgcagacctggtgatcgtcctgaagcggggtgccatccttgagttcgataagccagagaagctgctcagccggaaggacagcgtcttcgcctccttcgtccgtgcagacaagtgacctgccagagcccaagtgccatcccacattcggaccctgcccatacccctgcctgggttttctaac

SEQ ID NO: 15324 - DNA, 84310 bp, Homo sapiens
gagcccgagcccagcccgcgcccgcgccgccatgcccctggccttctgcggcagcgagaaccactcggccgcctaccgggtggaccagggggtcctcaacaacggctgctttgtggacgcgctcaacgtggtgccgcacgtcttcctactcttcatcaccttccccatcctcttcattggtgagtgcgcgcagcgagccgcggaggaggggacgggagagcagggagggaggaggaggcgctgcgcgccgcaccgctcggcgtccccttccggcccgcgaccgccgtccgcctcgttcccggggtcccctgccctgtgtcctgcccgccggtccccgcactcgcacaccagctcatcccttcactcccccggtgcccccgatcccgcgccaaacacagcggacgtttgtgacccatgggatcaccaagttttgcttctgcagggccaagagctgggatggggaaaagggaaagaggaggtctcagcacgcagtgggaaactggagaggggtcgggcctcaccctccgtggcgcagcttagggagccgggtcacccctcccgcaaggcagcctccctgtcagccgcagctgggcctagggaagagggaagcctgtgctttggagtctgggatggaggcccagctaacccctatgctttcaccgggctgagccgcgcagtggtccgtgatctctgacagtcccaggcccgcgccctgggcgaggagaggcgagagctagggacttggattcccttcccccgccaccccacccgggcatgtgtctccagagcgcaacttctcaggctctgcgcaaagtagctccgactcgccgacgcagcgaccccggcgcccttgcttgcaaagttgggcgccacggccgggacaatcgtgcgtgcctctccactgaggtcccccccatctctctccaagaccttgactcttccagaccagtcaagtctatcaactcatagggtgtcccctgcatccccaaaacgtgttcattcactttaagaaaacaagcaaatcttaaaattcatatacagctttggggaagaaaggaaagattgtcacaaaattagatttacaagaggttgctgcagaagcagagttgctagttattaacaaagacagttagatagaaatagaaataaaacatacaaaatatgtgctcatatgtgcatcaaaaatcaaaaaagaacagcatttacacttctgttctcagccaaacggtttattaacctgatgacttgtcacacaagaagttagtatgtataatggggtaccttggcagggcacagtggcttacatctgtaatctcagcattttggtgggctgtgacaggaagactgcttgagtccaggagttcgagaccagcctgggcaacatagtgagaccccccccgccctttctacaaaaaattaaaaattagctgagcatggtgatgtgcgcctgtagtcccagctactcaggaggctgaggcgggaggatcacttgagcctaggagatcaaggctgtagtgagccgtgatcgtggcactgcactccagcagaggcaacagagcaagaccctgtctcagtaaaaaggtgtggtgggggaggtaccagcataggaccaggctgaatgagttggacgtttagtttgtgtgtaccagccttggggatcctcatgtgtaggtgtcaccctcaccatggacccaatgcccaagcacctttctggggttcatgcaccctcttcctcctccaagtgggcaggcatcctgcctctgactgtctctccctgcaggatggggaagtcagagctccaaggtgcacatccaccacagcacatggcttcatttccctgggcacaacctgcggtggatcctgaccttcatgctgctcttcgtcctggtgtgtgagattgcagagggcatcctgtctgatgggtgagtgactgtctgaggactcaggaaagtgaatctgctccagggtacttcctgaaaggcccaaggagatcctagctcacctatattccacaagcccatgtcttttgttactacatccagcagctcagtgtcttctatgtgccaacctctctgagctgggcactggacgcaagtgagtcccaggccctgccatcagtccaggagagcagagggaacacggacctgcatgccaagtcccagtgaaataatgctagagcctattagaatgccacaactccagtgaaaaatgtctggcctcttctacaacctgccggagttaccttcttggaaaaaaaaaaaaatctaaccatgccacccactcttgcataagacctttccttggttctcagctgttttgaagatgtggtctcagatcctcagcccaccattcaaggtcttcacagtcagccccacctatctctggcctcattccccatgcccaccttccgtttgggcctcacagcacactcctcacacctctgctacagcacagatcacactgtatgttaaagtttatgtctatttgcaaaactgtcttcagagtcagaaaggcctaagagttagaatctgagtcttgttcatctttgtgttcacagtgcaaggcatgtgataaacataaacattattcagtccataaacatttattgggtccttaggagaatgaatgaaaccatgttacaaataagtactctgggaggtgagaggaaggcagaattgggcaagctccatggttgagagggctttggagcggagtctggaagggtgactaggcttcagacacacagaggaggaaggagagagagaactggtggtgcctgagggaagggaaaaggcaccaaagagaaaagcaggtagggctagggagcagcgcaggggctggagcattaaacacaggctggggagcgatggaggctgaggctgggaacccaggttggggcatctcaggaggactgtgaatcccagcctgcatgtttgggtcggatttggtcagcagtttggaacagaagagagatgtcatcagcataacacttttaggtgggaacctgaggtgttcagcgcaggctggaggcagggagaatctagaggtataatagaagcaggacttagcattgactgcagtagtctaggtgagcaataactgcagacagaaatggtgtgtcagcagtcagggacagaagaggagcgggagcagccatctcactaaggaagaatccagtaaccagcaaggatgagagactgccaggagagggagtggtggaggagagggatatttggcttgagtatctgaggtccagcgccccctgagctggaatcagattatacccagactgcactcctgcagtgctgcctggctcctgtagttggatggcaggggataggctccctcatcctccctcccgttccccaccttcccttccccaatgtccctgcatcctggcttcagcagtgatctctaaaatacctgcttgacttggaggcagcagctctgcctgcttattaaagtccctagaccagcaagaagaccagaaggcatactgctacacaagcacgtgacaagtccgcctccacccccacccctacaccccttccaaagtagcacaaatgccacagtgagccctcagatgggaaatactcaccagatggtgacagagaaagacacctccgcccttggagaaggaagacctgggtcttcagtgagcactgctgctgtgtaccagctatgggactttgcacaagtcattcaggctttctgggcctcataagcatttataaacatacgataaaacattttagttgccaacttaaaaatgtgtgagaaagtataaggtgtttcaaaattatttcaaggagtaaagaggcaagagttttgaagatccctgggcagggtgttggctgttcccagtgtggccattcatgactgctctctggccttatgaaacaagcatcatagtccctggcttgcctgcttcatggggctgtggagggtgaaattcgagcatggacagggtgcagagcccggagtggcagagcactgggtagactgtgtattcccagaatgtgggaaactggaatgaatcggtccagggatgccctcctgctggctgtcagcagcccctcctgtgtgtggctgtactgcttcagctcagtgcaaagggccatctcctccccagggcacagatcagctcaagctgagtaattgtcatctggtctttgtgagctcctacccccaggcctgagtgaggggcaggaaaagagcagacaggagaagtcacagacccttgtgatacctccagtctaatccagcctgggttttcagagctgtctggaaatttagggggcaggtgggagggggctgattaaggcagccctgatttgatttagagtgagcctcatttagtgactaattaagccatcttaaacctgtagggcttcccctcttcctttgggtattatttctttctgtgatgttctgaattcagaacaatcaaaacagtataagttagtgaagaagatattttttaataactacaatattttcccagaccaccatacactggataaagcctgtatataaaactttacctaatttcttaactaattgaatgtgtattatttaacaaagcagctaaaaactattctatgaagccatgtcatgaaatatttagttcaattatggttaatcctcatcttatttcgtcttataaaattttaacatttctacctcctattgcaaaaaaaagcatttatatcagcatataataaaacatgtctagatgtcagcttaaaaatgtgtgagagagtagagggtgtttcaaaattatttcaaggagtaaagaggcaagagttttgaagatccccaggaagggtgttggctgtgcccagtgttgccattcatgactgctctctggccttgtctgtcttgtaccttctatattagtttgaagaccttttttggagaatattcactaaagaatatcaatatctaccatttcattaaaaaagaaatgtggagtttgccttttcaagttggtttgatgcttattgatgttttcagggacccagcctcttcccatctttccataccatcctgtgtgtgtgtgtcagcctatcttccccatggtcacaaggtggctgcctagctccgggtattgcttagcatgagcagagagggcatgctgccgacatgcctctcctttatgacagagatcattctttctttgacatctcactggccagaatacgtggaccaacactggcaaaggagtatggaattgcatggctgcttaaaccaatcaccatccattccctggggctgggtatattgctgctggagcaaacctgtggtcctcctggcacagaataaggggaagatactctttggtggacagcccacattgcctctacacttgcacctcagtcccaccagacccactgaggtcacaggatagctctcctcatgtccttcctccttctctgttgaactcttatgtatccttcaaagtccagcctggtgccacctcctctgggaagctgtccttggttgcccaccccctcctttgtgctctctcagtctctgtccatcggcagtatcacttccctagcctgctgactccaacagttagctctgagcatggcagccccctccataccatcagcttctcaagggcagggacccttggcacactggatagaagtagcctggtgggcaacagcagcactgaggcagcaagctgtagcaggccatctgggaatggagtgggtaccacagggctggagcagaaagggcaggctgggcagatctgataaagtggctggaggccacatagcctgggcctttcgttccaggctgagcagagtgggttttgctgtctgcaggagggagctgtggaagggcatgatcacgaccaactaaggtgaccctcctcaccaggcccagggaagactgaggcctggaaggaggctctggctgcctctgggtcttacccccaggccacagtccacccacttagaggcctctgtgagttaaggtggagagactatgagctggtattgactgctccattccccatcccgagagaggagacaaaatcagtgaccttggaaatgcctcttcgtgcctcagtttcctcaccccataaaatgggagactaagagtacccactcgatggggtttaatgaagattaaatgggttaacatatatcgcatgcttagaacagtgcctggcacagagtaaatgctccataaatactgactctcatcagtttgttatcacagcctctggggagggcgccagtgctgacttatgctgttcgtgttaaatggggctgtcactgggtgagttgtggcatacaggcccctgcactgttcaagagaccccagcaacccttgtgcttagggctcagcacatagtaaggcctccagatcatatacccagctctactccatgtactggcagctctgcccagcccataccccaaatacgcccattaactaaagggccctgcagcctataaagtgatgctataaaggttcagtgttcagcctttgaaattcaaggcctgggctgctctattgcagtacttagcatgtccccatcctgtctgtttctctctcccatctcagggtgaccgaatcccaccatctgcacctgtacatgccagccgggatggcgttcatggctgctgtcacctccgtggtctactatcacaacatcgagacttccaacttccccaagctgctaattggtaggtgaggtgtaggagggaggggcagtaccttcattcatttcttcagataatgtttactgaggactcattatgtgccagctattgctctaaacagtagagatttggaatagaaaaagaaaaaaatccctgccttcatggagcttacagtctggtgaaggaggatagacaggcaaagacagtgaataaacaagcaaacaaataggtggtggggatgctatgaagaaaatcaagctgagtaaggggtaggggcaatgacaatgttgctatctacacaggatggtcagggaagggctgtggtaactgtgggcatgcagatatttgggggaaggtattccctgcaaggggagtgacaagtgcaaagtcctctgatagggatagatttggcaaagatgtcactgtgggcaaagccaaatgagcaaggggaagagtgggaggtgagggcaggcgtcaggagaggagcgagcaagagtcccaggctctgggcctgagagcctgggtgaactgtggcatcaataactgatgtgacagaggagggggaggtgggctgtggtggggataaagttttctactgggggcatatcgagtttgagatgtcacagagacagccaactcaagtgtcaagttgggctttcatggggaggtcaggacaggagctacactttcaggaggtgggccttgtagatgacatctaaagcttgagcctggggctggctgccgtggctcacacctgtaaccccagcactttgggaggccgaggtgggcggatcacccgaggtcaggagtttgagaccagcctgaccaacatggagaaacccccacctctactaaaaatagaaaaattagctgggcatggtggcacgcatcggtggtcccaggtactcaggaggctgaggcagtcaaatctcttgaacccaggaggtggagattgtagtgagctgagatcgcgccactgcagtccagcctgggtgacagagcaagactccatctagaaggaaggaaggaaggaaggaaggagggagggagggaagggagggagggaggagggagggagaagaaagcttgagcctggatgaggtcacctggggagagaagagaaaggctctgggaccagagcttgaggtttgctaacatttagagagactcgggaaggactgcccacttagagcttctgagatgttaaatactgcaggactggggtcccaggcagaagcaacaggatgatggttggtgtttactgagcatgtgccatggggcaggctccatgccatgttccttacattcattgtcccacaggctaattcccccagcctccttattggtattgttaatatccccattttccagtgtggaccctgaaactgagaggttaaaaataataacagtaaatactcactttgtacttactgtatgccaggccccatcctacctatgtgatatattaattcatttaatccttgcaacaactctatgaggtaggtaccattattattttccctttacatatcagaaaactgaggctcagaggttaaataactggcactagtctagctcgtcaaggggcacagccgggagtctagcatctgtgcaatctcctaatcatttctgagactgcgtgtctaagggccctcagacttcgtccttggggtaaaggtatcaatccgcaggtctgcctctgtgttggggttcagcctgtgtgtctaaggctggggctgtacatctggcagttagactttgttcacactatgtccttaagtcagactgatttttaggtatcacagcatcgaattgacatttggagtctggcacactctgtgctaagccagtgacatcatggtgttgtcagggagtacagggtgtttcttgcactagtcacaggtctgcctttctgtagaaggtgggatctgagctccattaggattatccaggtgatccccctacccctagcccaggggcccccacatgagtatgaatgggagctgggggaagcaggttgagaggggagatgttaaatacaggcttcagagagccaccctgcttccatttctgaagtagctccttgtctgtagagaacccttcattaaccagggcctggctgaccagtgtcctctggaaacaccctgtctggacatctgaggagttcattttctcattctccagcaaacacataatgttctctctttaaagcacaagttatcacccgtggatggatttgtccttttctaaggaacaaagactaactccctccattccccttgttggagttatctccccttgaaaggacactccacagagccagaaattctagaacagggaaaagtggaggggacgtgcctgtgaactgcagggacagaaggaaatgggtattgggagaatggccagccctccaaggggctgatgtctggcctgggtatggagtcccacagaaaggggacctgtgatgcagcttacattgtcccgtgagggaaccatgatcctggaacccagatgaggccaaggaaatgttctctgaaaaagtcatatttgagctgagaactgaaggaactaactgggagaagggaggaaagagtgcttcaggcagaggaaacagcatgtgcaaaggccccaaggcagaaggaacaaaacacattagaaaattcagaagaagaagagtggcgtgggtgcaaagtggaggggagctggactttgggttttgtttgcttgtgcccaggctggagtgcagtggcaccaccttgggtcactacaacctccgcttcctgggttcaagcggattcttgtgcctcagcctgctgagtagctgggaatacaggcgtgtaccaccacactcagataattttttgtatttttagaagagttgggatttcaccctgttgaccatgctggtcttgaactcctggccttaagtgatcaggtctcaacttcccaaagtgttgggattacagccgtgagccaccgcacccacctggaaggtcataccacagatgtttgcctttatcccaacagcaatgggaagttgtgtgtgtgtgtgtgtgtgtgtgtgtgtgtgtgtgtgtgtgtggtttaacatgtttaacataaaatttatcatcttaactgtttttaagtatagtgttctgtggcattaagtatattcacagccgggcatggtggctcatgcctgtaatcccagcaccttggcaggccaaggcaggtgaattgcttgagctcagaagttcgagaccagcctggccaacatgccaaaaccccgtctctacaaaaaacataaaaattagctgggcgtggtaatgtacacctgtagttccagctacttgggaggctgaggtgggagtatcatgggaggctgaggagagaggatcagttgagcctggaaagtggaggctacagtgagccaagattgtgccactgcactccagccaagattgtgccactgcactccagcctggacaacagagtgagaccctgtctcaaaaaaagaaaaaaaaagtatattcacagtgctgtgtagccatcaccactatccatctccagaactttttcatcttcccaggttgaaactctgtactcattaaatgataactccccatttctccctccttacagcccctgacgaccaccattctactttctatctatgaatttgagcactctaggtacctcatctaagcggcatcatgcactgtctttttttttttttttttttttgagatggagtcttgctctgttgcccaggttggagtgcagtggtgcaatctcggctcaccgcaacctctgcttctctggttcaagcgattctcctgcctcagcctcctgagtaactgggactataggtacctgccaccacgcctggctaatttttgtatttttagtagagacggggtttcaccatattggctaggctggtctcaaactcctgatcttgtgatctgcccacctcggcctcccaaagtgctcggattacaggcgagagccaccttgcctggcctatttgtctttttatgacttgcttatttcactgagcataatgtcctcaaggttcatccatgttgtagcatgtattgaaatttccttcctttttaaggctaatattctactgtatggatatgccacattttgtttatctattcgtctgtcagtgggttgcttccacctcttgactcttgtaaatagcactgctatgaacatgggtgcattgaggggttttcgacataatcataataattgctttatggagaccagcttggaggagaacaagatggggaggaagtgtggaaaccaatgagaaggctctcagggtatagcgggaatacagaggacgcatgatgatgcctggacttaggtggtaccacagggatggagagaagtagatagagtcaagctatttaggacgtgaaatagacagcatttgttaatgggagaggtgtggggcgagggagaagaatagagggagaaggaggagtaatgggagctcaccagcagcccccatgttatgcctctttccttccttttccctcttctctcatcaggcattcagcttttgctgagtacttctgtgtctgacaacaggctgagcactcagcactgcaggacaggactatgcaaaaaacctctgggcctagtcctgggtgcactgctaattccctgtgtgaccttgcacaagacatccaagctctctgagcctcggattccccacctgggcaggaagagtaagtccctgcctaagtcatagggttgtaatgaagagcaaagcagaccatatctgttaagtgttagggacaagacaagcatgaggcatattttcaagtctcggctcctgtaggcagctctcactaagggctaaagggcttctgatgcctgggatagaatctgtccggcagagtggagtggaggcagggggacagccttcagctgtggaattcctccagtcctagagaccagcctgagctgggggacattattccagtcctgaggcatgagagcagaaggccgatgcttctgccctccatcctaatgtcctcctgcagggacccaaggtggatggcatcgatccccccgggtgagctcagccctgggcgcatggtggggcccaacatctcaacctgtttcctaaccctgagccaggcaggacagatcccagatttgtgcccaagagatgctctggcatccatgcccaggcccacatagggatagagggcagggtgaaagtctctctccctcactcgggtcctctggagaggggctctgtgtcatgaagctgaccttatccgcatctggtctaggagggaggagggaaggagctgccagtgctaaaatctcccccaccctcaaagggggacttcacaggttattgctggttttggttgttggaagctgacagtgatttattggcagattgaagtgagtgtgtgtgcgagaatttaggatagaatctactgatagcttctgaggtttaccttccccaggtcttaaatctggagataataaaaatataacagctaatgtccaaagagcacccgctgcgtgtgaggctcactgcactaaatgctttccatatgtttctcacaagaaccttctaggtagcactattatgattcccacttaatggatgaggaaactaagctctagaaggctaagtgactaatccaaggtcacacagctattatgtcacaggctctgagcccaggtgtatctggctgcggagccaccaccactaacccctgtataacgctgcctcacagaactgtggctggctctttccgtatcccccatgcccctgctccatcatcatgctgtggtgggctctgaactgtgaggacagggatccaggctttcaccctctctctgtccctagctgccagtgcacttgggcaaggtcacatcctatttctgggcctcagtttcctcatctgtaaaatgaaaggctggattgaatgacctttaagatttccctcacttggaaattccacaagtaagtcattatagcatggagcttgcatgcatgggctccagcgtcaggccagcccagctctgccagttaatgggtgtgtggccttggatctgttacctaacctttctgagcctcatttcctttgtctgagaaattgggggtgacggcagtgtactttctttgaaaagttatggtgaggaatagataagatcatgtgtttaaagtgcttacttggcacagtgcctgtaacttagttaaattcaataaataaatttcccattcttcccatgatcatttatttttaagggacatttgtctgaccagtttgatttatgagattattggtgtttttcatgaatgttaagacgtacgtgcgtcatcttagagtcatgtactctgatatattcacacgtgcacatccacttactcggaaatgtacacacccaggcacgcttattctgtctccttctctgccacatacttgcacacattatgtgagtgtacacacatgatgcacacacgtctctgcgatcttccatctctcctcggcagccctgctggtgtattggaccctggccttcatcaccaagaccatcaagtttgtcaagttcttggaccacgccatcggcttctcgcagctacgcttctgcctcacagggctgctggtgatcctctatgggatgctgctcctcgtggaggtcaatgtcatcagggtgagggtaagcaggccacctgggccagggtggggtgggaagcagaggctctggcctctgtcctgccctgggttcaggcccccaccctgcttctcagccaaactgagaagggatcagcttgttttacccgcccgtgtaaaggggagtggggccgtggcggaaatttcaggatagacactgcatctggcccacgtgtgctctaccccagggtcccagagggagaggggggtgatgggtgtgttcgctgaggttggcggatgactttccgtagaaagggaagataagcatcaggcactggcctctcctactttctttcttcgggggtgggggactttgctttaatgtattcatatcgtcacgctggtaaatgaatgagtaagtgttttgttttcctttctgtttgctcccgcctccctctctcttcctcaccccagactccaaccttccccttcccctgcccctacctccccaggcagcccagactaatgaactcgtttgtctttcccatgctttgtttttattagtataataccatatgtgtctgtctaaataaatacctattcaggttttttcctctcaacacaagtgaatatgtaggtttcccccacggtatttatcttgtaagaatgggatcatattatgcagttttctgcactgtgcttttctcacccaacaaatatctcttgggactccctccaagccatctgatatggctaattccgttttcttaatggctgcataatattccatcgtatggatgagccataatgtgttcagctatttctctatggatgggcatttactttgttgccaagttcttgccttcatgaataatggtgtgttgaacatacttatatatttatgtattgctgcttttatttctatgggagagagtccaaggaatggcgttgctgggtcaaagggtctgtgtattttaaattttgatcagtgttacatattgccttccagaaagactgtaatctgccagcaatgagtgagaaaaccctttccctgccttccaaccagcagtgagggctacagccctttcgaacttggactgcctgcatttctctgactcttctgcttttagttggtgatctgcagggcacaaagctccttatgtgtccccccatccagtgaccctcacaggaaccctgtgatgcaagcaccatcccctttatagatgaggaaacattttagatgaggcttgtccaaaaacaccttgctagtaagtggaggaggcaggattcaaaaccaggtctgcatgacttggagttctgtgaactgtatatgaaacatggtggtatccttagatctgtggagaagatagcatatgagagattcctgctcctccccaacccaacctaaacccaacccagcctagccatggggggttcaaagtcgacctcaatgagcagttacaaagtcaggatgccctgacattggtggccaagaagtgttggggaatccttttcctggtaataattacaggcgaaagatggccccatctgttagagatcaagtgtggaatatcacaaccccagatccttgctggggcaaggtagggagtggtgagaagttggacttacccatcccccatggcccatgtgccccacagagatacatcttcttcaagacaccgagggaggtgaagcctcccgaggacctgcaagacctgggggtacgcttcctgcagcccttcgtgaatctgctgtccaaaggcacctactggtggatgaacgccttcatcaagactgcccacaagaagcccatcgacttgcgagccatcgggaagctgcccatcgccatgagggccctcaccaactaccaacggctctgcgaggcctttgacgcccaggtggtcagtgggggcacagccacaccatctattcactgccttctggtttagggtcacagagagggacctcaaagggcattaggtcaaaatcctggtgggacaagaggggaaactgaggctggtgaggggaagaagcttgccttaagtcacacagtgaaccagggacaggtgcagggctgaggattcataggacaggcacagttggaatggcccttaccgtttaggtcgtctagtccaaagtccttatccagatggggaaactgaggctctgagaagggaagtgaccccactggactctcacatccctgtgctctttcctctgcagcttactgactataaaggttggagtgttcacttgatttggagcaggggtgttagtggcctgatccttatggtaactctatgagttgagccagacaggaatctccccatatcactgaggagcaaattgaggccctgagaaaggctgtgacctgcccagagctggccacagctggcaggcggcagaggcagtctcctggctcccagtccagtgctccttcacttcctctgccctcgcaccagggcagttgctgaggcagacacggtggcaggtggtaatgagtgagtgtggcacatggccacctcctcattccagtgctgtgctcatcacatagtccctgaccagctgtgtgaccttgagcaatcatctggccttagtttccccatctagaccatgttggtgttgatagggccctcccaactgtgcacttgctgattccatgatctcttcctggagttcacctatttgcagaggatgtgaccactgggtttccccagacaacaggagctaggggcatcctgggaggctaggcccagccgtgaattagccctcaggcactctgacctggccatggtctctctgggcagcggaaggacattcagggcactcaaggtgcccgggccatctggcaggcactcagccatgccttcgggaggcgcctggtcctcagcagcactttccgcatcttggccgacctgctgggcttcgccgggccactgtgcatctttgggatcgtggaccaccttgggaaggagaacgacgtcttccagcccaaggtaggcagccccaggggtagggtaaggcaccctctagatggttttcagttgtttctgagagtgcaacaggccaatgtgtgtgagccatggccacactggagtggctcctcacacatgcgcaaagcccatagcagtatccccaccacagaatactctacatctggtcaacagaaatgccagagggcgagcctatgccccaagggtatcctactctcctctcaccgtcactaccatagtacctctcccggtagttaggtcagtccgaaaactgcaggaagtgcttttgtttgtccagtgtctagagcttctgtgacttggatttgttggctttcagttcatgtcatcttagtaaactctttaaaagttttcaagatctgtcttcttcagtcctgtaaaggctggcacttgagctttctgcaggggcatcttgggagctactgtcagaggagagagaagtgggaaaccctcacgagtggagctttgtctctccccactccaaatttcattcaaagctgcccgtagttttattaatatgttggacttttccattaaaatttcttttttaagaaaagtttccatggcttaaaaaacactggagacttattagactagattatatccaatggccttggcagttgtaacgattctgcaaactgaaatttgttggagctagaaaacctttccccggggttatttgccctgcgtggggccgtagcatccacttcgggggctgggcagactgtgctctgttgtctgtttccttgcagccgtttaggtttaaatggccacaaaatgaaaactttttcacccctaataagtttcagagttttagtttccaagtgaggatgtcattataacattttaaccacagacagtctgaaaataatgcagagaatggggaattagggtttttaataatttatgacaccctttgcgtaacatttgttcatctcatgagctccaaaatcgcagccagcagttaatcctcaggaggtttatgttcatttttctggagacataattagtcagctgaacagttttggccacagatatgagatacgttgagtctgatttatgcagcaaactttcattgaacactgctgtgtgccaggcctgggttgggctgtgggaatatgaaagcaatagttatgatgaggatgattaacaatattaacagccacttactgaccacataatacatacctggctgtgtgcaggagttatccatgtgttatttaatccctaaaactatcctttggcgtgagtatattttgcaacatctttactgtggtatacctcaaatactgtacagtttatgagatgataggtattcttatccccattttacagatgagaaagttgaggctcagaaagtttaagtaattttccccagggtctctcagctagttaataacagaggcagaatttgaacacaagactcactccacagtctgggcatttacagccaggaagctaaattgactattattatcaagccatcacctctggctccaaggattatgaaatccaacagtgaggagagaaatcaaaataaaatacttttatgctatgtgttacatgtgactcttaggaggaatattcagggaattgtgggaaaagatagtgattaacttagccagtggtcatgaacagcttcatagaggaggggatgtttgaaaggggtcttgacggatgagtaggaatttgccaggctgccatgggaagatttcttgctcaaccaagaatgcaaggaccacttttgcttatttaaactttgatggcttttgaagccatatctggctttttgagcctctctactttacctggcccataaaagagaggggaagcggctgcttctcttgtctacaggagtgtcacctttggctctagcctgaccataggctaccccagaatacccccattggcgatcctgaagcagcatggagccagttgttaatatcagggggaaatggcacaggccagagcccttatcagagtgtccacaccacgctcttcttcctgtgtttcccaaaacccttgtgggattctgctaaggagagagctctgaggcaggacgtgccaaagagatggcgaaagcacttagaattttagttcatctgaacgttatcattgccgtttttttctctttgtttatacacaaaccctggggtttattaccgtctcattggaatgctcttgtcccagttacttagcacacaaatccctgagacagatggccctgcctcagtggcagtgggccttatcagatttaatattttttccctgcagcccaaacacaatcagaaaatttccgacacagaaacaagagttgaaagtaaatatagtctccagtgtccgcaacaaagaactctccatcatgtggttgcctgggatgtggcttaattctcatgtgggcttctgagctcagaaaatgggggaaagggatcatttactgagatcatttggttcatctcccagcccccaagccattctaatccagagagaaccgagtgctattctggtctttatgaatgacaaagaaggaagctccctagctacatgttgcagtgtttcacagtctgggagaggaagccgttttttctgcccagcctgaatccatcctgcagcagttggcacagcgaggcacctgtggtttattcatcatcactcttccttcctaagatactcagagttggcaagaaacatgtcatccttggtatccgcaaggacgaacatttctgatgtcctctttagttactgaaagtgtctgtgacttgccagatctttgatgctcctgtcaccccgctgccactccccagggaaagctgggacccaggttgggctctgcctatgatctatagctctttccagcctcctctccaacccaacccctactcccaatctgtcacctcccatggatgccactgatctggctgaaggacaagagaattagattcataatgagctgctggtgtctgaaacctgccagcactgccctgggctatcagttgagccaaaggaagaaggaacagtctgggtttgatcgaagggctaaagcttcaaacagcctctaagtctcagtaggaaaatgtgtaggtttgggagggtgtatgtgtttccgaatgagttcccctaagaactgcttatggttctatatgtgtgttctgtttgtccctgtgtcttttggtgtgtctttttctgcgtgtgtgtgtgcatgtgtgtgtgtctatgcccccgtttggattgccatatttgtggctatcattatgagtgacttaatgagtgtatatgcattggtgtttctgtgactttgtggttttgatgcatgggctggcctcttcataaccatgtccatgcagctggtctggcctagagtacctgccttcaattcactagctccttcttggccatcaagactctgctcaaatgtcacctgctccagggagccttcacctggttgaattagatgccccttatctgtgctcacataacatcctatcaaagcgccctgtttctttccctgacttgatcctctgtcccctattgcctgacctctgtgtgcccagcactcagcccactgcctgacacccaggagatgcacgggaaatggttctgcaaagaaggaataatgcagcaattactatatattgagtgcttacacttactgttttttcacatgcactgttacattgacttctcataacaactctctgaagtcccttcatagcctcaccttacagatgaggaaactgaagctaagagaggttgaggaacttacctaaggacacagtggctaatatatgatgagtcaggacctctaagtccaggctcttaaccaccgtgtcaaacagtcttgtatgaatgggtaggtgtgttggtctctgggtggccaaagataattttattctttacccagggcctcccggggctgggacctacggacaactcaccttttgacacctgccaaaataggaaacaagagtccaagtgatcccctctcctttaagcaccagagaacatgtgaaggggacctttccaatcatacctctggcctggcagagacaatggggctccaaactgtagagtcgggagtgctgggttttagtcctacctctgcagctaactcatttattctcctcagcagtcacattctgcaagcctcaaatgcaaaatgtgtaataacttctgtagaaagtacatgggggcatgaagatcattggcttgattgcttttaaaaaatcggtattgagcactactggggaaatccctggaaacaaacacaattcttccctgagagcttgtgaaaatgcaagactagggcctatgattttccaaagcattttcttccaccaagtgtcaggttgtaggtccttggtcttttctctcttgccttggtacctgcagggtgctgaccagtgctatcatatcccctccccgtttcctaggaccctcttctcggtagactccaacagggcctgccttccttgggcagcatggcaggcctcttggctagtctagtacccacttcttttttttttttttttttttttggatggagcctcactctgtctcccaggctggagtgcactggcgcaatcttagctcactgcaacctctgcctcctgggttcaagcaattctcctggcccagcctcccaagtagctgggattacaggcatgcatcaccatgtccagctatttttttgtatttttagtagaaacagggtttcagcatgttggccaggctggtctcaaactcccgacctcaggtgatctgcctacttcagcctcccaaaatgctggaattacaggcatgacccaccacgcctagtcaggtacccacttcttaactgaaacttagctattccaggttctatcccttttaaaccaactctttgaagagaggtctaataatgacccaatgacttatagctgcagtgagatttttattttaacaggtcacaaaattctcaatccacaaaagtagatttctgaccctaggttattttgttgggggcggagagaggaagtcaaaggttttgcagcctttagagctgcaaaaccagaatttgttgttttgttaaaaatgcacaaataccgacgagtatatttaagtaacacccatagtctaacgaacaaacatgatcagttggcttttccagccctcattctccagcctgtgtgttttctgctcattgtaacacagcgtgtgtgtggcattccatgtttctccagagctttcatgagaatcagtggtcttggatgcatagtgttcccatgagtaccttaattacctaaccattccctgtggttggaaatttatatgggtttttgcattctccttctgctctgaccccaaaataaatgtctgtgttcatacagctattaccttatgtgaaattattttctttgggataaattctcatgatgtgttgttgctttaaaatagtggactccagtctccagagctgcgtctctgcagaggacagtgggacagaagaatcccagggcatgttaaaaaggaccgggtcttcctaaacccacatgcctatatttctgacccagtaccagccaggggggcaagtttccatcccccacaagtcacaaacctgtaactgacactaggatgcttaaggtcaaaggcctggacgaggcctagacagtgggtctggggtagtgtttttgacatcactcaggttcatgttcacatgttgtccccttaccagcatgtgaccttgggccagccactaaccctactgaaactcctttttttcatgtatgaaatggggctaataatggtaccctcctcattagggtattgtgaggatagagttttgcacctgataaatattgtctcctgccccttcctcccctggaaattcaggtctctccctgcagcctaattttaaggcccatttttctgcttccagcccacccctgcccttctaccttcgacctcctccctctgcctctccctctggtgcactggcaaatgggacagagagcctcggtagggccttcctcttagagtcttgcacgcatccctcagtggtctccctgtggctgcttcctgctgccaccaacagatacagacccctgtcgcacagatcatggtagagacagtggtgagcaggaccagacagctccagggagcagtgagggctggcttagagaacctctgttaaactgagaggccaccatcaggaagctctgatccaagatccaggaatccctgactctagggaaaggcctccaatgagagcctgggccctctctgcctgattctgattgtggatgtgccctcaaactccttctcatcactttgttccatccctctttaccctgcagcagctcccacaccctgccaaacaggatgcacagtccagggcagtgtctgagaaagagcagagatctgtcttcatggaaatattgatgtggctctgctggggagcaatggatttatcaagatcaaagttttcctgggagttattgatgcttaatttggaaatagacacactgttgatccctggtatctttagcaacaaagttaaaatgtttgtttttcttcactggttgccatctgagatcttgccggaagtacacaagagaaccttaaatttaacaggaggccctgggagcccatgaggctggcgggcttgggtctgaaatcttttcagtctcttgtaagtgatgagctctcattctctcctgagagctctacggtgccatgttttccactggccttttctgctcagtaattgctacattacaggctgttggtaagttcggaacaagggagctgctgattccatttctgtagcagagaacatgcaccgtgagacttgttgtaccagttcaggttttaggtgctctatttattcttgccccattcagaatgctctcccctgggtctgtggccacaatgctaagagtcatatttatgggcctgcagttgtaattgggccccattctgttcccccaagtggaaagatgaacagggtgtaagcaaccttccctgtagttagaaaaacgtttagttggatttatcagtctgatttttcactcataaacaattgcacaagcctttgcaagcccagagggtcttgtaataatgatggccgtggtccattatggcacagtgatgtgttctacggtggtcattttgctggcaatgacagtcacctctgaacttctctttccaacagacacaatttctcggggtttactttgtctcatcccaagagttccttgccaatgcctacgtcttagctgtgcttctgttccttgccctcctactgcaaaggacatttctgcaagcatcctactatgtggccattgaaactggaattaacttgagaggagcaatacaggtacttggatgattattttttcactttgccataagaaccattattaggaataatgtccatgagtgttattcatcctcatggacactcaagaataattctgctgtaaatttattttttgttgcccattaacgatgttttaaaacagtaaccattgacaaggcagtgtgggatagtggaaaatatcttgggctgaacttgggagacagtgtagctctggctctggttctgccttggactgggtctgaaaatccagctgctcagcccttggcttgaaagtggtagacgtcactaattgatcacagcactctttctgaccaagggtaaatgcaaccttggaatcctctctaagtggctgttccagagttctgctaccagacagtcttctttgggtgtgaaaaaaggaatgtgcttgacatacaaggtctagatagcctctaagacagggtcccctctaagatggggtattggtccatggcctgttaggaactgagccacacatcaggaggtaagcagtgggagcaagcattactacctgagctctgcctcctgtcagatcagcggctacattagactctcataggagtgcgaaccctattgtgaactgtgcaggcaagggtctaggttgtgtgttccttatgagaatctaatgcctgatgatctgaagtggaacagtttcatcctgaaaccatccctctcccccaggtccatggaaaaattgtcttccacgaaaccagtccctggtgccaaaaaggttgaggaccactgctctaagttctatttgaacccttaagtcttgctcactaatgagagtgacctatttggtctgttgggtcacttaagtctaggctcttggtcctgccttctgtgatttccttcttagagtttctggaaagatgatcaaagccagggagtgttcagggcccctctgaagaaggtgatgatgagagttgtccaagtcccagggtcttcactaggattttggttcagctatcagactagagagacatcctgattgagagtagtttaaatgggatagaagtttgtttattcttcagatagagtcagggctgacacaggagctactcaatgatcagagacctggcttcttctgtcatgttgctctgccagccttcttttgtgacttttgtctccatagccatggtgggtattgaaactgccactatatttacatttaaactagccagaagaagggacaagaggagggaacgcattttccttttaaaatggtaatacctgatttgcacataccctctcgcatcccattggtgagaaagtggccaaatggccgtatctagagagtctagaaagagcttggtctttattcttgacagctatatatgcactgctagaaattctctgtgcaaagaggagaatgggcattgggaataactagatgcagctatgcctagtgatgtccatgaagttgtggtaaaatcctgaagctaccttgttctttggaaatgttcctcagaatcattaacattagtcatgtgggagacaggagaagaagctctgcagaaaagggaccgagaggacaaggatatagcttgggctggggacaatgtcagagtccaaactctggctatcttggaatagtctgtgtgaacggtgccctcccaagttgtgcagtgcacaacctgtgcagctatatatggcaaccctgcccatccccagtggtttctcactgggaaagcagagtatttcctcagggatgtcattatgtgacaatagtggaaaaagcccaggaaaatctaagaccttctaagactcatgggggcccagagctgggaggaaccaagctgttgctcagttcagaaaacttctctagaaatcccagcctctcctcacacccctccagtgacaggcagacttgcaccaccacaagcaacagccacttttgtggttgggcagttttgtaattaaatatactaatgtgtgtatgtcataaattacattttccaattatgccaaaagagccaaaaatggttttttaatggttagcatataatcgtttttatcaaattgcttgaatctttcatgttaataagagagattcattactatgccacaaaaagcaaatactggcattaattatagaaacaaattaggggggtggagcgcaatggctcatgactgtaatcccagcgctttgggaggctgaggcgggtggatcacaaggtcagaagtttgagaccagcctgaccaacatagtgaaaccccatctctactaaaaatacaaaaattagccaggcatgttggcgtgcacctgtagtcccagctactcaggaggctgaggcaggagaatcgcttgaacccagcaggtggaggttgcagtgagctgagatcgtgccactatactccagcttgggcgacagagtgagacttcatctcaaaaaaaaaaaaaaaaaaaaagtggctcatgcctgtaatcccagcactttgggaggccaaggcgggtggatcacaaggtcaggagatcgagaccatcctggctaacatggtgaaaccccgtctctactaaaaatacaaaaaaaaattagccaggcatggtggcgggtgcctgtagtcccagctactcgggaggctgaggcaggagaatggcgtgaacccaggaggaggagcttgcagtgagccgagatggcaccaccgcactccagcctgggcgacacagcaagactctgaaaaaaaaaaaaaggaaagaaagaaggaaaggaaaggaaagaaaggaaaggaaaggaaggaaagaaagaaagaaaggaaagagagagagagaaagaaagaaagaaagaaagaaagaaagaaagaaagaaagaaagaaagaaagaaagaaagaaagagaaagaaagaaagaaaaagaaaagaaaggagttagggagaaaaaaaccctttctttctttcttttggagatttccggaaaatgtacccttacggatgagagcctgtgtcttcatgggttagagaataaccacgctttgtgcataaaaagttattaagcacaattcctgaattatacataattactagctgtcagtcagttgtgcatttctgtgtatgctggtcttcacttaataagactttatttcacagatcacttggtgtccctacttcactgaaactaggtgattatcttttgaagtctcatttcacataacctaggaggtatatagatttctttaaaaatgtcattgccattattttaaaccttacccatggtatatataaacttacagaaagacagaataggttcattattttaaaccttgcccatggtgtatattagctcacagaaagacatagaataggttcctgccttaagaaaacctgacccacaaaaaagcctgggtttacacaaaagaggaattaagggcggggagcccaccttacaacagaatgaataatagaattttatccaagagcaggcatcctgaggacatttaagacccggatgcatttttccttgttcaagagcacacatccaaaaattgcagtctttctgcgagtcatgatcactctgcacataaagcgtttaggttcagagctcggggaggccattaccatggctgctctctgtctgccctgtgagggtccttggggtggctgcactctggggatggtgctggggctgactgactcacgcggtcgtgtaacacatcagaccttccaaagtcgaacccttgttttgtttcaaggctcaattatgacaggacttggtctcagagcagatcccctccctaggctggagaaggccactttaaaacagatggcctgccccacttcatcatttttatggctctgatctgtgttctccactggcctctggtaaatcaagaatacaagtggacatgaagatctgctttaaaaaataaagaacagaccgggtgcggtggctcatgcctgtaatctcagcatttggaggccgaggtggatggatctcctgaggtcaggagtttgagaccagcctggccaacatggcaaaaccccatctctgctaaaaatataaaaattagctgggcatggtaggcacgtgcctataattccagctactccggaggctgaggcatgagaattgcttgaacccggaaggtggaggctgcagtgagctgagatcatgccacttcactccagcctgggaagcagagcgagactctgtctctaaataaataagtaaatgaattaaattaaataaaaataaagaaccaattaagtcctgtctacaggaaaaggccttacttgctggagaagtagcttgctgtgctggagtagactagtaagttggaacggtgatacagtaccaccttacagagctgctctagggcaccatggggactgtctgagaagcccctggcacactgtaacaggtggcatctggtgtggtgatgatgatgagaatgatgatgaatgtgaaacactctgctctcatttctagaccaagatttacaataaaattatgcacctgtccacctccaacctgtccatgggagaaatgactgctggacagatctgtaatctggttgccatcgacaccaatcagctcatgtggtttttcttcttgtgcccaaacctctgggctatgccagtacaggtactagatgggctgaggggaagggaggggggcagcaggacacacaaccagaatctgctggtccatggccagtaactaggagcacaccgtcttccactccatgcttgcctgtacctttcacacacttggctataccacaggctgtacctctgggtccctcctgtcccatactctgcaagcactgaccatctctcttaatgaccagagaaggcagtatcattaagactttaaaaatggagccaactttataaactatagaaaaatcaagccaggttcaggggctcacacctgtaatcccagcactttgggaggctgaggcaggaagattacatgagcacaggagttcaagactggcctgggcaacacagtgagaccccttctatgcagaaaaaaaaaagaagaaagaaaagaaaaatcgtacatggaatgcccacagatcttaaaagctatgttgtagcaaaatatttaattacatcaaaaagtgttagtgatgtatttttaagcaaaaagagtaagttacaaatagtatatgttgtatgcttactactaaactggaatatatgttatgtatacatttgtacagattcacacatgaaaaagaattggaaaatcacatagtgggattataagtgatttttattttctttatgtgtttctaaattctctaataagcgtgtataagatttggaaatcaacaacatgatacttttagcctaggcaacaaagtgagaccctgtctgtacaaaaaattagctggaagtggtggctcacaactatagccccagctactcagaggctgaggtgggaagattacctaaagtccaggaggcagaggttgcagtgagctacaatcacaccactgcactccagcctgggcgatagagtgacaccttgtctcaaaaacaaacaaaacctggtgttttttagccagatgtggtggtgcgcccctttagtcccagctacctgggagtctgagatggaaggattgcttgaccccaggagttcaaggctgcagtgagcaatgatcacgcccctgcacttcagcctggacaacagagagactcctgtctcttaaaaaataaaaataaaaacgttaaaacatggtatttttttaaagcaagacaacctttggtgctggctcaggaagaggtacattaccccccaataatcagaggagaatcgtcagcatgattgatctgacctcgggcttcatgtgtcccatctcccacccggagctcttccaccacagagtctgatcctgtcctatgcctgggactaaatcttcaccctggtgttcaggccagaaaccgaaatcccagacccattcccagagggcgggaaggttccaccgggagagcttgatgtagcagaaagtgacttgggtgagacaggctgattcaaatacttaacctctctgagccttggtttctttatctatgaaatggggaggctgcccaccctctggagttgctatggcaattcagttagataatgtaagtaacacagcaggcagagtggcccccagagtcttcacttcgtaaatatcagatccctctaccttgcacatgtttggtatgagtgaggtgttaccaatccagaatccattgcttcttgggataaagattccataaaccttcatctccagtgatttgtattggtcctccttacttgtaaagcttagagtttaaaaatattaaaagaaaaaaaggggagaggctcccacagggacacagctagacaagatgagatgcagggaatctgatgttcttttttatgggaacagtcatatatgccatcccccattaccacctacccatgcccagactgcccccgctccattctgccaagacagatcaatgactataaaagctacaaaagggcctggagatctcatctagtttagttaccaaccaaccttttatgcacaagactttctaagctgggtgtggtggctcatgcctgtagtctcagccactcaaaaggctgaggtaggaggatggcttgagcccaagagttcgagtccagcctgggcaacatagagagacctcatctctaacacaattttttttttgaaacatgaaaaatgaagatttctgaccatgcttctctcattagttaacactttgggctgtgagggtctgatgcagagagacacagcctgggaggatcctaacatgtacacagcattcaaaaggctacaagacactttctgttgtgtccccttgaacaagcagtttgtaagattttgttggccaggcatggtggctcgctcctgtaatcccagcactttgggaggctgaggctgatggttcacctgaggtcaggagttcgagaccagcctgaccaatatggtgaaaccccgtctctactaaaaatacaaaaattagccgggcatgatggcgtgtgcctgtagtctcagctactccggaggctgagacaggagaattgcttgagcccaggaggcggagactgtggtgagctgagatcgtgtcactgcgttccagcctgggtaacagagcgagactcggtctaaaaaaaaaaaaaaaaaagaaatcaggttttgtctactaaacctgctgcacggttaccgttactagtactcacagggtttgttgcacatgcatcgttgctaatagtgctaactaatattaacagcccttgccctatgcctggccctgtcccagcccccctcccttgtataatttaacccttgcactgggggtagagattttcatatctactgatttcttacctttgctcatttatcatggagtgtcctttggttttctgtgtttgtatatacctttaccacttatagatttgaccagcactcaagaaccagtgttactcctgggagttaatacaatcccagccccatggcaaagaaactcatgtggttaggattctgtgtgcagcctggttagccacagggcacgtaaggctttttataatattgacatgagtgcagaagccccattcccgtgtaagccctgagggctcttgtttcataatctttttttggtcacatgcacacagctttattgagatataacccactcatttaaagcatacaaatcagtgggttttagtgtcctatattcacagagctgtgcagccatcatcacaaatgtggaagttttcatttccccaaaaagaaacccgtacccattggcagtcactcctcatcttcgcccccagcccttggccaccgtttatctacacatacttttgaaaggctagtgaaactttctcagaaaaataaatgcttgctcaaacatttgggctataatttcaggggcttcatgggtgcccccctgacatttatcaagaacaccaggttaaggaatttagctataatggaggcctctgtgtttcccagtctcctgggtatcagaggcccagagagggcaggtgccttaccctgggccacgcagtgaaccagtggcagcaccatactcacacatctcctttctgcggttccccagtgacagagttctcaggaagctttttcatttattttctgagaggagggtaggccatcttgtattgatctccaactatatgccagccacaattctaggtgcttatcataaaggttcatttaatcttcacaatagtcctgcagagtggacagagtccttcagagtgggcattataatcaccattttaaagatggagaagctgaaaaccagagaggttaagtaactcacccaagactgcacagcaaaaggctggggctttgaaactcagggccacagactccaaagactatgtcctccccactatgctagatttttttcctaacctgtgaataggagacaaaatagtccttttatttctcacagttgctttgcacactcagaatccatgatttcttctgcatgagggccattcagacctgtgcagaagagagtaatggaccaaggagtcttgggagcacctaggaggaggggatgggggagcatgaggaggagccagggaacagcagcagctgcagcaccagctcccaccccagcctctgccagtctcttggaggtggtgtgggtgcagacaccggctcacaaggtgccctgttagtgagcttggggtgccatgggagccttcttgttgtcaggcccaacccaagctggctgaagaacaccctgatggcctccatttgagcacaactaatgaaggactggatgccagagataagtccaggagggtgatgctgcagggcaggccagggaagagggtacttcatctctatcatggtcctctgcccatccatgccagcatctaacacctgttaaacactgggaggcaggtggtgaaggggccacttcccagcctctaagatacctcctaagccaggaggcattctgtgattaaattacagggcctcccacttactcctttatccttgaggcggtgctggaagcttaatgccaatctggtgtagggctctgggactacaggaccaaggcaagcagtcctttctctctctctctctctttttagctaaggaagccagcacatctgttctttgagaaaaagccctgtatttagaggtgtctgcctttgaaggcaacctgagaaactgtcatcttggcgctttggggactggccatttacacttctcataaatattcagaagtaggcagtcatttacataaagctaaatgcagaaggaattctcttttcagggaatacctggcagattcattaaaaaaattaaagaaaccaagagcataagaatgaaaagcgaattctcggaccccaggctggttttttctggcatgggtgcagtaactttgcctctttgctcagttatcacttttttccaatgacagtaaccataagccctgagagccagcaaatagaacaaaaggtgctgtcacaaacattgtgcaatctcatctctgagatttccatctggaaaatagactggagagagttaaggcttcaaccagccttgcagataaatgcagttagttaccagcccagcaaccctctgcttgcatgagagcccattatgctaacctccttttgaaattgctttgtttctcctccttccctgcactccactccccaagataatttggaaacctgggcaccaaggcttgtcccactctaggggactggggaaacagggattttgccagcacctcctggcagggcaaccatcaggtcaaagggacctgacccatgaccccttcctcagatcattgtgggtgtgattctcctctactacatactcggagtcagtgccttaattggagcagctgtcatcattctactggctcctgtccagtacttcgtggccaccaagctgtctcaggcccagcggagcacactggtgagtgcccaaaggtgtgtgtgttttgtccctcttcccctccttccctcgacagcagcaggtctcctcccacacacccacactgtcattgactttgactttgactttgagtaggccacttcacctgtccaggcctcagcttctttgtctgggaaatggagtcaatgggggaggaggctgcctcccggtgaggacaggaggcgggcatggcagtgacagtattgacactcaggccttcctctcgggtgggagacggagcagaagcctctcccctctgactcggggacccctgcaggagtattccaatgagcggctgaagcagaccaacgagatgctccgcggcatcaagctgctgaagctgtacgcctgggagaacatcttccgcacgcgggtggagacgacccgcaggaaggagatgaccagcctcagggcctttgccatctatacctccatctccagtgagttcaccccacacagccagccctgggtgctgctgcgtacatgcaaggagagggtgtcagagctcgggtaagagggggtgcagggacagaagcaggaggccttgagattatccgactcagtaggggagcctcaaactggctctgatagctaagctcccagaaatcaaagtactcttcattcatttatccaacaaacatgcatggaaagcctgctatgtgctggacactgtgctggccctcaggatacagtgatgaggaagagagatgaagtttcattcctcatggaactgatatgttattgacagacagcagcaagtaagtaaatgaccacagttttgaactctcctaagaatgaagactttttagtaagtcagactgagctgtcattgccctggggaagctacaagaaagcttccatccacttggggctatgcaaaagaaaaagactagttatccttaaatatcagaagcccaggctgaaggtactcacaggtgtagggactgaatttatattaaccaagtagtttgggaaccccaagccaaggaagaagaaaaagaccaaaactggtaaaagtcctagagtcccatatacttgaaaccattttactgagaatgtaaaacttttttttctttttttgagatggagtctcgctctgtcacccaggctggagtgcagtggcaaaatctcggctcactgcaacctccacatcccaggttcaagtgattctcctgcctcagcctcccatgtagctgggactacaggcacacaccaccacacccgactaatttttgtatttttagtagagacagagtttcaccatattggccaggctagtcttgaactcctgacctcgtgatccacccgcctcagcctcccaaagtgctggaattacatgcatgagccactgtgcccagcccaaaagattttttagaaattgaaattttagttatggaaattaattcagtgaacaatggtcccctggtcagagtgagggcttacggaggtcaggtgatccatggagtcctggcccaagtttatctcacagttggtctcgtggctccgtggacccatcccatggtggttacttcccaagtgcataattgggatgtagatatttagcaaccagctgacttcacactagttccctgacctgtccagtctaagagtcattatggccaagtggaagcccctggaaagaagaaaacaaaaaagaaaccaaaacttactcagtgcacaggttacatgaatgagtatagctgaagagagaatttttgaattagaagacagatgagtggggattacacagaacgtggcaaggagagtaagttggtagaaccattttacagatgggaaattaaggccagaggggagtgtgttcctgagatccctcctgaggttagtagcatggctcggactagatcctccaaagtctcttaactcctggtctcaggctattttccacaaagagctgggggcctctgtggggtgaagaagacttaggacaccatggggcaccattatgaggccatttcctcctaggagaaaaaaaatctctgggctctgaaaggagtagaattagggtaggaaattaagagaggctaccgaccacctcctccaactaaaattggttcttttggtgccaggaagagacacacctggtgggggagggaaggtggtaatggagggggtgctggtagtgtctcccagatagacccatccaacaagtctcatggagaatgagacggtcactcaggtcatctgcgtattcttggcattcttgctgcctagagagagagtctgatggagctaggtggccaccaagctgtcccactccccaagacagtttggaaacatgggcaccaaggcatgtccctgtctaggggactggggaaatatcccatagcagtgttctcacagtatggggctggccatgaataccccaggagtccaacctccctttgtccagctagaccatggtgtcctatgcctcaggcagggaatgtggtccagtcatcagtggctgggccgtctgccatacatggtgcaagccatggcgttttatgcagaaagtcctgctagcatttgattttctcagaatggagctgtgagcatggcaggcaaccactgtttcctggattcttcaccaagacaccccaagttcctggtctctccccgttatcctcatccctgaccctgtggttctcagagcctccaaacacactcaggctaagcactccatagacaggggaaatttggaaggaacatctagggagctcagaaaagccaatgtccctagccccaggcccacttcaaccttctctctgtcagtcctgcctgcccctggaggctggttacatgaagagtaaccccctgcttgtgtatagccccccagttttgtacaggtttagagacagttcccagcagtaggaacagctgccgaggtgggagagggcttctcccgatagccgggggacttcctctcccaggaacaacagggtggggtagagcaggcttgtcgttgctgagatagagagagggaagggaaacaacaaggaaagtgggggcactgggtccccaaggttcctggcacagcaagcagtgaagttggggcagcctcaggtcatgtagtgggggcaggtgacatctgctttgactgctcctaagagatatgtactcatctcctggattccaaactgcagcctgggacatgttttcttatataaacagcatcaaaagatgtgtgagttcccaggctagcccactgaaccctacctagtgggtgctcattgtcccccagagcccccagaagacaagccgtggctttgtgatgggcctggggccaggaggacctagggatatgttgtgaagagctgagaagactctggaaaaaaggggctctggagccaagcaggagcccgcccaggactcctcacgtgtccaagtcacctagggagagaaacagagcagcccaggttggtccctggaagagagcagcggaggaggggaaaggggagagcccctggggagagctttgaaagtcaagtgctgtttgctcagtgtgtttgcctttccgaggatgtgtttttttttccctccgttagtcagcagtgggagggggagagagacgggtggtagggtgcagggtacctcctggctgcaggcatatgctttgagtgcgtgttcatttacctcctctggacttcctgccttctgttaccagggatcaagacacaggtcattaggcgtgaggtaatggggcatctcttgttctgacccctggcgccagtcttggagtcctgacgctgcagaggagccccagagtcacatttcctgttggggcccatcctgctcatatgcggcaccatcagacttctgggcaggcaagattacctgtgactctgtctgatggtctcgccatcaatatcactgagagtagctgtgtatggagtcccgaactggtacaggataaaacagggggctgaaaagggaatgaatgggcacagtttctctggcatcaaaagtcacatccagaattgatatttcctgttgagtaaaaatagaaatataagttgctcagtggatgttgagtgagccctattcatgtgccccactctgtgccaagcaccaggaaggagggaagggaaaaatgataagatgttctccccgttctccaggagtttatgctccactaagaagtcagagctaacatgcacagaacagtgtggcagcgagagcagaaccgtgtggccagctccatgcttgccgcctagcaagcgtgattgcacttcatcctcataacaacttggtgaggtgtgttgctctgttgtcccattttacagcagagaggactgactctcagtgaattgaaatgtctcagtgaggtcttccacagcaaaaggcgaagcacagagaaggaagtccatgtgggctgggagttcacccagagattcatgtaggggcaatgtgggctgtaccttgcaagatggtgggatttcaatgaggagaagacaaagtgggaggaagctggagacaaggactgtggtctcttcctttagaagtcagttcaatctttttttccttgtggaagcagcataactctaggtggttcctctgtatctgaggacaagctttgtagaggtgacaaaggggtcctaggtcctatcaggcaagcactcgatatgctgccagttcattctgtccattgtgagatacccattccagagcgcttcctctgtgccaggctctacggaggttctggatgttaaagaggaagcaggcatggccctggccctcccagtcttgtgggagattgatcatgcccatgaatagtgaccatgtggtcagagccacagggtcaattccaaatgcccctgtttctcttttgtgttactcacctgactctgggtctttcgtttcttccattcattttttttaaacaaatatttcctgcccaccttctgtgtgccaggcctggggatgcagtgggagaagcctctgtcctcctcagtggaggcgctaactcagaacaggcagtggagaaaaacaacatgacctggagacctggtgccccttccttccccagcatctttgaaattcttttggttgttgttgttttgagatggagtctcactctgttgtcaggctggagtgcagtggcgcgatctcaactcactgcaacctctgcctcccaggttcaagtaattctccctgcctcagcctcccaagtagctgggattacaggtgctctctaccatgcccagtaatattttttgtatttttagtagagacagggtttcgccatgttggccagcctggtctcaaactcctgacctcaggtgatccacctgccttggcctcccaaaatgctgggattacaagcatgagccactgtgcctggcctgaaattcttcaatatctacctgcccttctgccagttggtgcagccacagtgggctgcttatgcatatcctggcctggcttggtggggagcatggctgagggagagccggggcacccatcaattaaggaggtaaagatcagtctgactgagatgcctcctgccacacttcctcagctgccagcaactgacaccattaacctgatttccttccccctctgttgactgcactgactattggactgaatgggaaacagccccgtgcacctcaaaatgcacttcccctcctgcagatgcatcttgcaattaggcccaaactgtgagcctgcatgctcctcccctggccctgcacaggcaacaaagctgaagttaatcagaggtacaaatggctggctatgcctctctgacacgtaacttctggaacatgtatcaatgctttggaaatgaaaagctcctggtattgcaatgccaggctggtgcccataagggccagaaaacattccttgggcaaagccagggggagtgggtgatctgatcccagctcaggtttgttgatttgttgttttgtttgtttcgttttgtatggggcaagggttgagggtatgaaaaacttacactatcatttactaccgtagtccccagaacccagcacaccagcacaaggcctggaacagggataccttttttgaatgaataagtctttttttttttttttttttttttttttgagacagagtttcactcttgttgcccaggctggagtgcagtggcgcgatctcggctcactgcaacctccgcctcctgggttcaagcgattctcctgcctcagcctctcgagtagctaggattacaggtatgcgccaccacgcctggctaatattttggtatttttagtagagatggggtttcaccatgttggccaggctggtctcaaactcctgacctcaggtgatccacccaccttggcctcccagagtgctgggattacaggcgtgagccactgtgcccagccttgaatggataagtcttaagggatatttttggaaaggatattctaaaaaatacccatgtctctacactattgcagaagggctttcagttttgatggcagcctttcaggccagcctacacgcaactaaacttttccataacagcatcacacttacacaagaagaaggttttataatccacttgccattatttaacatagttcttcctccttaactttcaagatctgagcactataatgttcttctttttgtttttgtttttttctaaatcaaattaaggtgagtcacctcaccttgggcctgagttggacagaaatctattcttggctatattccccacccctccaccaccttggaaccttatagaactttatgtggttcaggaaaatgagggcgaggcctcagatcttcaacccatgacagctgtatgcccagctccctgccttcctgtcttacccccagctagggcacaggactgactattgtgcccagagaggtgccagagcctgtaacaaccccagacttcccaggtccagccacatccaccccagagccccaaaagatgatcttcagagagacctttaaaacacaagtagctggtcacttccatccagaccagaacccaagatggctgtgctcttgctgagacatgttggttgtcattgcctccgagcccactttagccctcagctctgtaccagaaatgctgttcctttgggaatcacagccaaagaagagatggagcagttctggaataagaacacaagttcaaactgtcccatatctccccacatcactatctacagttggtctcttcccatggcgatgtccatctgccaccgtggcactggtattgctttgagtgcaggggtctctctttttggcatgttggccctgttactccctgggaactttgagtcttatttggaatgcgtgaagtccctgtgtccggggccagcactgatccacacagctaagtttgcactcatcttccctctcatgtatcatatctggaatggggtctgacacttgatgtgggacctaggaaaaggcctgaagattccccagctataccaatctggagtggttgtcccggttcttactgtactgtcctctgtagggctggcagccatgtgaagaacagaggttcccagcatcatcttcctacacattattacattcacccatctttctgtttctcacttttatctccagcctgggaaaagttctccttatttgtttaaatccttttgtgcttttagatccccttggagcagtagagtaccttgtagaccataagagtggaaaagggtctagttttctccttgtttctaaagatggggtggctgaaaaaactccccttttttgcctacagcttgcctctctgggcctagaagtggttattctgtctccatattggcctttgatttgtgctgagggtcagcttttggctccttcttcctgagacagtggaaacaatgccagctgtgtggcttctgccctgggggctgggggtgaggctttgggtgccactgcctgtgggttgctggcttaaaggacaattctgttcattggtgagagcccaggccattaacacctacgcagtgttattgaaagaagagaggcgggggtggaggggaattagtctatcccagctagagggagataaagagggctagttagttcttggagcagctgctttgaggagaaaatgtatagcttttgacacaacaggaagatccagaaaattatcattgaacatattaaaggttatttctttttcttgcaaaacacacacacacacacacacacacacacacacacgcgaacacacgcagctgatgattctactctcccagccccagccctgaaggggacccagaactccctgcacaaaggctgtccttcaaggggagggtgaaagaagtggaaaatcacattttcattctttagcgtctccatacaacagccagaactgggcagaagctaattatatcagaagcatactccatgttgctgcatcagctttgggatgttcatttttaaatttatttatagcttgtctcattcctcaaaggagttcagggagctacaaaaataaagacaataaaattgaaaaaaattaaattaaaaaaaccatgaccagggaaaatgtgcagtagaatgaagtgtcaattatcacgttttctgactgcaaaatctcccccacggctgatgcaccatcatttactacaacagcccctcttgttggacatttccagtttatttcgtttgggatggtttgttgctgttgctgtggttgtggttttgttttattgaattttgtgttagctgcagctaataccatcttgctgatggctttgcgctgctcttgaatgattactcaggataaatttcctggagacggattataggatcagaaggtctgaacttctgtgtggctctagctacaaagcaccagattgctttccaagagcgttgtagcaatttataatccaacactcagcctattttttggctgggagtcaagccccagaatgtgaaggaggggtcttggcctggagcaggggctgagggatgggtgcacaggacccctccttattggttatttatggggatgggccaggaggagcagaatagaggcccctgccctcccagttgctccttggagtgactgaccccataggggaggggcgaggctacctcacatttagaactatgtagttggtgatggtcaaggtcctaggtctgatgggcatcctcctccctctcctcctcagccagtaatggctgcactatgtcgtatgtcctagatctgggtcccttttgctgtgggaacaccaataatacttacgctgtttcctgccggaaacggtgcaggagggctgtggcatggtagtgggccctggaaaccatctagccttcatgaggaagggcagttaaagcacaggcatgtatgatgttggtattgattaaaagcctcacgggcagagaaattcgccatctgccagggccccagccatacgagggctccagccatacatcctccaggagactgggacctctccaattgcaggagccttgccttccccatcagattaggaattccccgaggatggggacaatgtccttcccacctgcttgagaactcctaaggggcatgtactctgtctccccattgtatctggaacttcctgggagcatagctcctgtctccgtcctcagactgggaatcccctaagggcagaggccatgtccttccacccacttgggattccctgaagttggggaccacatctctgatgtacaatgctttgtatgtactgactgctgcaggattcttggagtaaatgggcagtcaacttcttggactggtattgaccatctggacttcatcagagtgtccaagactttgccattcattagacaggggccatgtgcacaggcagagccctggcctctggcttctggctcctgactcctggtccctctgctttaatttggctaatggcagaaccagactcctttctgggctgccctggaaggggatccttgaatgaaagaggatagatgggaaggtggcagctgacatggttacctcttatgccatgggggggctgctctctctggaaatttaggcctggggtcagggcactgttgagcattttacaccctaggccagaggaggggtgacctgtggagcagggctaagctagtagcccatgaggtatgatgtgtaggcagcacctggggctcacagagcctgttacccatgttatctcctctgaccttggaaagagctggggtgtatgaacaagtatttataagtttacaaaaatcatatgaggaaactgaggcacggggaaggtaaatgacatgccctaggttacacagcttataagtagcagggattctgcccttctgtcacaccaagtcccactgtcttttcttcctggagtccctgtgactgatctaaaggccacatgtttaacagaataaggaggaggcctctgttgcagcaaaccagctaccccacccgcacacagactctaagggacatcctgctttaagctgtccttagttactaatacctcagtgagaatgagtttgaaattttctcaagagccatgggagactaggaagtctctaagcttcatagagagcctggcttggggggacacaggagccaaaggcagaggaagaagtggcagctttgtgcccccagaaacacgtgctcctgacctcacagttggccacagccagccaactctcccatccttctcccaccactttcccgtggggctaacttcaccctgtccacacggagtgacttaacagtttaagccccagagtcgggggccggggtacctgggacaagagtcctgagggaaatggggtgaggaactggaagtgccacagggctagagttctgcccctagcctactggagctgtgccccacaggctggccccactggactgcgctgcctccaagccatcctgggcatctccatgtgtagctgtcacgctcctcccactaaacgcctccctgtgcttcctctgcagttttcatgaacacggccatccccattgcagctgtcctcatagtaagtggatcctttctccatctcttgggggtagggtggagggggagggcgtctgcagtgacaggctgcccagatttggcctttctgcacaggggcctcagaagacaggctccacagccagactgaaaataggatcgaaagtttatagagggtgtggcccctccccaactccagccgaacaggggcctctgcctccaggcctggaagaccggaggcttagtatttagagaaattaaactttcttttaaaaaatagctatccaaatttttaatttttaaagtgaaacatgtgtattgtagaagtgatgggaaatccagaacagaaagctcaaagagaattaaaatcacccataatcccactggtaacatttttaatgtgtttctttccagtctttttttaaggcctatgatatgtcattttctacaaaaataggaatgtgctatgcatgcagttttgcaacctgctcttttaaatttaggaatatgccacacacaattctccatgccactgaatattatgatggtggctttctaaagcaattttgataaaagctgtgtgtgagctgagccatgggggtcaagcagcatgctcctacagaaaggcctgggcccctacgagcctgcagccccctcacccagcctcccatccccatcttctgtgatggctgcagttccttaaaaagatctgcttatttcccccggggccagtgtccctgagctgtgtagagttcacagcctgtcggatacacttgggaattcacttccaatgtgatgtattgagctggttcctggcctggctcctgggggaactgtgggtaacagaggccactgagccagccaggtggctggggcaaagcactgtgcagtttcgtaatcactctgtttacgttatcccgatgaggactggggagatgagcaccccgcctgctgtctgcagagggggccgtgctgacctaacccgagatctcctccctgcttattcccagccaagactgggcaggacagggagtcttggccaggacagggagggagcagcccctgctctccagcttgaagtcctgaacttgttggggacgtttccatgagatgactgtggggatgatgaaggtgtctccaactaaaagatcctcttaggagcctgctccctgacagccctctcatttcccttccagtgctgagcgtttccagtgtgggagggacccacaccctgggccaccctggcctcacttgtgcctctgtccacagactttcgtgggccacgtcagcttcttcaaagaggccgacttctcgccctccgtggcctttgcctccctctccctcttccatatcttggtcacaccgctgttcctgctgtccagtgtggtccgatctaccgtcaaagctctagtgaggtgaggggagggtccgggcgagggcactgggcaggcaggtcctgtgtcagcctcaaggcttgctcgagtgatggccaaaccacagctgtttggtcccggaacacacccccattgctgggccttgctgtagctggtcctggttggtcagagggacattggcctgtatggtttcccagctcgccatccctgagcaaggacttgcttacatacctcccaggagaggggactcactgtcactttcacgacaacttaaaaaaaaaaaaaaaccagtgttgagccaaatgtggaatcctcctaaattctacccactggtcctaacttcaccctccagagccaccaagaatgaggccatcccgtccccacgtggctgccccatggatatcagaaggcatccactgtgtctatctttcccaggccaagtatcccctaccctttccacagcccctgagccctcacagcctcagccagtgaaacagcttcccccaagcgctgggtcctgctctgattggcccacagctcttggaggctcccacttccaggctctagagcctcatggggactctgccactgtcccagaggcattgccctcttgggaatgaaagcctgaaggtagaaggctgaggctttggctgggaaatgccctgtctggagtgagaagatgtccttgggcctctgaagtagctctgcctccttgaaagcaagagcctgtcatgcctctatggagggctggcttgtccttacccatggccagagaaccagtcagtaacaaatgtcctctgtgtcttcagccttgaggaaggtgacacccctgtctcatgggaccctggcaggtactgggaagctggaaggaaggagtagctgttggaatgaagtagctgatagagagggtagcttgcagggggagactctagcatgggttcaaagatggaatggggcataactcagcaaaattatgctctaaggagtatctgaccaggcagtagctggttaaacagggattagctcccatttccacagtcggctgtgctgactcagtttcttgaccagggtgttgtggggtctgaagatcacccctcctcccaccacccactctccagccctatgattctgtgtagaaaccacagatttaagaacgctgcacctgcctgaaaactgttgcactgatcccaaagcgttcatattttcaaacactctggatcccactgtttccaggaatggaacaccagagtagcagaggccttttcagtgaggcagctcaggctctggctgaaggtgggcgcaggacactacctgaagcttcaccccaagagatgagggccagctccactcttcccagtcaccgcctgtgggggagggaggctggacagggcatgaaggcagagcctggtggtctgcccctcccatctaggggtggcgcacagaaagggagactccaggccacagctcacttacaccccagaataaccttgccttgagggtgggatggcttgtctgccccaggcctgttggacatttagcaaaagagaagaaaggggaatacaaacaatcctgagcttcccagaaagctttcacacctccaggatgggagagaatgaactagaagagtgaagcttccagtgcttcctcaggtccacagggaaatctggacaggggagagggtaggaatagccgcctcccccgtgagtaatgacacctcctccagcaggctgttatggggatccgattacataatgctacaaaacagttaacacagtgtctggcatttagtgtatgctcacaaaatactagctattgattctttaccaatcctagtcctaactaaccttaaccctgaccaatccaacaccaaccatccttcagtctaataacccagactaactaacttcaacattaaccctaaaactaaccaatctcacctccaatccagaccccagcctattccagctgactggtcaaccctagcaaaccctggtaacaccaattacctgcccccatgcccactggtctgcccccttcagtgtgggctttgtgggactatacttcaggcctgagatcctgctcagagctctctatcaggctgcgccctctcccctcccctctgcccctggcaggggtgaggggtgtctctgtgcttcccgagcagcgtgcaaaagctaagcgagttcctgtccagtgcagagatccgtgaggagcagtgtgccccccatgagcccacacctcagggcccagccagcaagtaccaggcggtggtgagtgcccggcctccccttgctactcccagcatggtcctctaaggcccaaaacttgggcctgctgtgtcggacttctgccttttttcccaggaagaggggctcccttccctacacagctcccagcccagtgggtcctcacctccaaaccacccccagcccctcagggttgtgaaccgcaagcgtccagcccgggaggattgtcggggcctcaccggcccactgcagagcctggtccccagtgcagatggcgatgctgacaactgctgtgtccaggtgagtcctgctgccccatgcctggccacccagcaccaactcccagagggagctcagcacctggaaagccagaaagctgcatgcttagtcctctgcagaggtcaccctgcctgcctgtacggtccataggagtccagaaaccagggaccaccaagtggggggacccccagccttaggcaagggtcagcatgagaaggccagtctcccactcccctgctctggaagtgatccaggggctggaatcagtgtcttttggctttcatggaggaggggaagccagagactattcactgggaactggctgcctttctgttctctcctgggcggtgggacacgcctaatgaagatcatgggaggctacttcacgtggaccccagatggaatccccacactgtccaacatcaccattcgtatcccccgaggtatggcccagtccacccctccagcatgcccctccccatgtcccactgaataacatagagataaaaagacaaagctgcatttattgagcacctactctctgctcattcttggtgtatgccctgggtatattatagaaggggaaggctacattctagaggcttccgtgtgctgggtgggagtgaagcactaaggacagggtaaaattgccagccttaatgtcaaaccatccattgcagacagtataggtaatgcacaaaaagatcagaagtgggtagccaaggaacgcaagtggaagtgatggggtttctgagaatggacaaaggccctgaggccatgaggcaggaggattttctggcagaggcagccatgagcaaagtatggaggtgggttggaggtgggacccaggatggtgtttcttgggaccacaaggagcctgggctcatactaggagcatgggaaaggagaagcgagtgcttaggaagggtggcggggcaggaaatcagagagggggaaggacctggggagccagaggaggatgttgatttccagaaggaaaggattaaagagggagaggacttgctggggattctaggtaggaagaaagaaaacaggggccccagggttgggtgcatctgtctgtctgtctttctgggtaatggttgttcagactcccccggccccactcacatctgccaccctccctccctgcaggccagctgactatgatcgtggggcaggtgggctgcggcaagtcctcgctccttctagccgcactgggggagatgcagaaggtctcaggggctgtcttctggagcaggtaatacatgtatcctcagggcccagtggaggggaaatctccttttaaccatcctcctcagttgaggatgcacacacatttattggagggcccactctgtgttcagtgaggactcaataaatgctgctaatggatattctcatcatcatcactagtacgtattcacctcttactatgcgcaggttctttgctaagtcctttgcatgcattatttcatttaatttttatgataactaacaaggtccatactgttctcaattctcatttatagaggaaggttaaactatttgtcctaattcacacagctaataagtggcagagctggaattgaaactcagttctgtcagactctgaatcccatggttactcagatgcacggcagtaatttcccagtgtgggaaattgcaacaccaacattggtttccagcttggtcctgagctgcactgacctacacaccataagtgggtgttctgaagatccagatgtaaccaataaatgttggtttctgggcaaagatcactgtcttaattaaagagccagaaccccaggctcagtcaatcacgaatctgttatttatacccacctacttccaagaagcacttgaaactagttgatgaaagattcatgtaaaaatcaaaaccacaatgagataccatctcacacccgttagaatggtgatcgttaaaaagtcaggaaacaacaaatgctggagaggatgtggagaaataggaacgcttttacactgttggtgggagtgtaaattagttcaaccattgtggaagacagtgcggtgattcctcaaggatctagaaccagaaataccatttgacccagcaattccattactgggtatatacccaaaggattataaatcattctactataaagacacatgcagacgtatgtttattgcagcactattcacaatagcaaagacttggaaacaacccaaatgcccatcaatgatagactggataaagaaaatgtggcacatatacaccatggaatactatgcagacataaaaaaggttgagttcgtgtcctttgcagggacatggatgaagctggaaactatcattctcagcaaactcacacaggaacagaaaagcaaataccacatgttctcactcataagtgggagttgaacaatgagaacacatggacacagggaggggaacatcacacactggggcctgtctgggggtggggggcaaggggagggatagcattaggagaaatacttaatgtagatgaagggttgatgggtgcagcaaaccaccatggcatgtgtatacctatgtaacaaacctgcacgttctgcacgtatatcccagaacttgaagtataataaaaaaagatgcatgtaaaataaaaccctttaaaaaggtaagaaaataggaactgagaaatgaagagggtaaaaagatgttcagcaacctgggcagaggacaactacagccatcaacataaaacctggctctgtgccctctggtagccaagggaaaaagggatctctgggctttggagtattcatttaggaataaaagttgcagccaatcagcagaagggcaagctttccctaccaatcatttctaggggaaaattattgaaggtgtcaggtttttcataagcatgagtacagaactgagcagggagaaagactttgggcccaatgtctgaatatcaacatgcacccccgtttcctgcatttccaagatgtccctgaatggtgtatccaaaagatggcaaatttccctcctcagtggggtcgtgggctagcagatgagccccttgggtttcccatcacctcccatcagggactgtgatgtctttgggggcagaggggtctttgcctccattcgccattttatttgggagatttttcaacatagcctgactgggaaggcccaggtattcggtttgagatcatattgccttattccgactgcctctccagcctttggagggaggagcccttttctgctgtccaactgcatgcctgcagcaagaagacaagagtccccagtgcactgtgagctgaagaaagtaaccaatatttattgggtacctcctatgggccatgccctttgctaagtgcattgtcaacatgatctcatcaagcctcctactaagtttaggaggggagtgttgttaccccatttcacagaagcagaaactcaggctcagagaagttgggtgacttactagtcagtgtgtggagcagagactctgcccatgttctttccctcaaacctggtcactgctggggcccccagggcctagtcctaagggttattgtccaagccccatgtagtggtcaggctggatctgggctctcctccaaggcagggcttttccagaaggattgcagggctcagacactggagctgcccctgccttgacctgctcagcatggatgtcaaaacccactctgaacctggtccctttgccctgctttcttctcctcccccaccctcatgccctcatgtggcatcgtgcctgcctcaggagctctccttgtcctatgtagatgaagcaggcatgattggcaggggtctgctctgccctgcctcagtccccacctcttctccaagctgtgccaaccctccgggtctgactgctgcccctctctcttaggaaacctctgccccagcccagggaacacaaggagcctctccaaggcagaggaccctaagcacttcttttttttattattttttattttattttaggttctgagatacatgtgcagagtgtgcaggtttgttacatagctatacatgtgccatggtgctttgctgcacctatcaacctgtcatctttttaagccccacatgtattaggtatttgtcctaatgctctccctcctcttgcctcccaccccccgacaggctcggtatgtgatgttcccctccctgtgtccacgtgttctcattgttcaactcccacttatagtgagcacatgtggtggttggttttctgttcctgcctaagcacttattataggccaggcactgtgcaggcacctcatcatctcagtcagtctgcaccgaactctgtgcagtagatattattatatcctcatttatcagattaggaaactgaggtgaagcaagttgtccaaggccacccagctgttaaatggcagaagtgggatttgcacctaggtgctcaagtgcattggtttgccaccatgtgctcaaagagaaggggcacaagagcctcatgaagaaggcatagctagcctgacagtccaaaggccagcagccgctgtggccatgactcacacacacctgcctcctcccagaactgccacgtgggtcctcacagctctgtccttatcaacacttactctcctttacaggtagcctaggccccagctcccagctctgttcgaggctcgcagaggggcggtagtgaaggggtctcatttctccaggatcctctttgctctctcgcccggtcctggtccagcttccctttcaagcatagtgaagtgcatttgttagcttgcagccaaccctgggaaatcatgagaatttgttcccaagtcaactcattctccagcgtccacagtgacgtattcactcacccagttgagcgcctagtgtatactagaccctgtgacagcaacaggagtgcaaaggtgactaagacgtggcccctgctttttttttttttttttttttttgagacggagtctcgccctgttgcccaggctggagtgcagtggtgcgatctcagctcctcacaagctctgcctcctaggttcaagcgattctcctgcttcagcctcccaagtagctgggactacaggtgtacaccaccatgccggctaattttttgtatttttagtagagacggggtttcactatgttggccagggtaatctcgaactcctgacctcatgatccgcccgcctcagcctcccaaagtgctgggattacaggcatgagccaccacccctggccggccccgcttttaagagaggggagagaagacctgggccttagaagagctcagaggaaccacaattgactctgcagtcaaggagaggaggctcactgcggatgtggtatttgagccttgaaggatgagtgtggtttcatcaagtagaaaaggcagggatgggaaagggaggtggtccaggcaggggtgatggtgtgggcaaagccttgctgatattaaagaacatagttctgtgcacctggaacactggatgcatggggtgcattatgaaagatgggactgaagaagtgaacttggcttagatcccatgtagtaggtctgagaagtaagatttaacccaaaggttgcaaaagaaccatgcttgtgataaaggatgatggattggggaaacagagaaaaagacagacagactgtaggaagggaggtattagcaaataatcataacacagtgtgaggtgtgcattaatattcactcattccaagtattgatcaagaagagaggtaggtactgggttaggaaacagcttgggcaaatgcatggggaaatgagagatgtcaagatgcattctaatggcagcctcttgaagatcttaagttgtttttggttcactcatttcgcaaatgaattcatttagcaaaagcactatggatacagtgcttacctctaggaagtaagttttagcccaaatgctgcagaaggatcatgcttatgacaaaggatgatggactggggagagagaaaaagaaaagacagacagactccaggaaggaaggtcagtctgcagctccttatagtggctaggagaaggagtctaggcagatacgactcaattagcttcatctgctgtttgtctctcaaaatctagacatgtgcactgctctggctggcccacctatcctgggcattgagttaagtgtgggggctgtgtgttgagagtccccctccattactggcaggaactccacacctcagacattgagccccaggtctgcagggagaagacgtgcttgcaaagtgagctaaaagcaaaacagcctctgacctggcaagcattcccaagtctgcacgcctgcagccagaggagagggtgatgccaggctgctgctcagatgcttttcagccatacccaggccaagacctggtgaccaggcagccagaaggagttccaggaggcacaaggcaggaagttgggggattaggaggtgtagaatggagaatgctctggggagatgggtgctttgttggtgcaactattcgtttattcctccagtgaccacgtgagcagtatggctgcacacacaggctctgcagccaagctgcctgggttcacatttggtctctgtgctttggaaaatttcataagctttctctaccagtttcccttattacccatgagattgatgtgaggattaacctagcatgtagtaaatatcctataaatattattattcaatagtgtacttctttgccaggaacaaaattcacctgttcctctttaaatgtcctccagtctgtctcctgggaaagattcttgtgagctccctggggacagggaccatattttgtttgtctcactgtatccgtagtgctttttgctaaacgaattcacttgctaaatgaatgaaccaggaacaacttaagaccttcaagaggctgccattataatgcatcttgacatctctctcctttccacatgcctttgtccgagctgtttcctaacccagtatttcactacccctcttctccatcaatatttggaatgagcaaataccgttagtgcatacctcacatggtattataattatttgctaatgcgtctgtctcctccatgactctgagctccttgagggattattccatgttgtaccccaggtgccccatgcagatgtgtattttgtgcactgttctgtgtaggctacaaaggaaaaggcctagcacctgcccttggggagctcacccacccaggatggacagaggtgtgcagacagagctgcagggtgggcacaaagggtccatctgctgaagtcctgcagatgcagccccgagcttgtccctcacgtcagcagcctggctcctggtctcagagagaactgtgtggttcccaagcattcactttaggaagaatcacttgcccctccctggctctctgcttcaaggaactgtgacaaccttgggatttgcaaactctctctttaatccttaagaggaaaatgttttggtaaaaagtcaagattagcagatacactcgggtgaaattctttccctggaaataaagaatagagccattaatatccacagtagagtgactttaaatgcccccggggggtcagcaggaaccagggccctgaggaaaggatcagcgtggggaagaggctcccacttccctgtgaggagctgcacatgcagtctcactggagctccctgctgcaatgctgttgcctgtggtggttggtgtggatgctgcctgccaagagccctgattccccaggaagagagaaaaaggcttctctcaggacggccctggtcgcatctgcctgtacaattcctggagcctttggggagctgaagtcaggggctcaagtgcccctgggtttcctggaggaggcaggtgtggtgagacagctgacagacaggagaagggatgctctgaggaagtgactgtccagccatgggaaccagatggcccctggctgtagtcctgatgctgccacttgctagctctgtgaccttgagcaggttacttcacctctctgagacagactcactgtctggacaatgagtaaaaccctacctttcctgtctcagagatttggcaatgggacccaatgacatcaattggaaaggatgctgtgggtgaaaggtaacctttcaggacagcgacaagcctgtctgggcaggatgaatgggctgtggagccctgtatatcctagctcactctttgaacctcagtttccacttcttccctttttatttattgccggggtcttaaatgagtgttgggggtatctgattctccctctgcctgtacttttggggccaagcactgagctgaaaagacaattcctcctagttctccaagcctacaacctgccccctaaccagctgtgagctgtaatacattctccagtgtcactgtgaggtttgtgccttcacccccattttatagatcaggaaacagaggctcctccaagtaaaggagcttgcctcagatttcacagccaatgagtggaaaagcctctgggattcaaatgtcagagcccatatttttcctacttctcgcacctgttatcatatgctgcctcttcctttaacctgcagttccctcccttcacctccaccgtctcaatccttcccactctttaaggttcagttcagctatgacttcttctatgaggctctactcattttctcagatttcttcctcctccaaatttcttgtaaaaattatgttttttctctgattctaaaagaatgcacattacattagaaaagatacacaagcatacagaagataaaaaccacctaatatcccatcacccagaagcttccagtttttctttatgcatttgcatatgcatttgtgtttacttttccccaaaagttctccgatactttgtcctacttttcttttgacccttataacttcctgacttcggtacctttctgatttgccctaccagagtgtgagcccctggaaggcagcctctgcaccctgattcaggttgccacacatatgccagctcctagtgggctggagggaaggacatgcggttggggaactggaagactcatgctttcagctgtgtgcttcctccctagagtgcaggcagaggaggaatcgaatcccctcagcactcttgtaaagaccacagcaatgagtgagagatggtgcctgccagacataccattctttacttttcagcttaaaacagatacaaagtttggggaggctcactggaggaggcttggggctacactggaaagagaagaacttggattcacaccccagcttcccctcttcccagctctgtcacatttgcaaactctgagtctcagtatcctcatgtgtaaaatggggatagggtttatagggttgtaaggatgagatgatgagttgtttgcaaacaacttctcacagtgcacagtgaaggtcagcaatgagagccagccccgccctttcttctttccaaatgattaatatatctgttaccagcctccattcattatatagctctgtcatgtgctaagcaccatgggggctgaaaaagatgttcttcctgccttaaaattccactggggatgaacaaattacacgggagctgatcagagaggaaggcagtccattatgagggctaattgagcagtgcagaccatgttgcaaactgagttagggcctggagagcttactgtgtgctggggtcctcaggaatgccacagatgcatcaataaccacctctgctactctggaagtagtcacatcaggaagactccagagataagcttatctgggctgtggccacagagctggaatttgtaagctttaggtttctatgtctcatgttaccagcttgtctataaattgtaaattacagccatctgatggttagggaatatgaagtttggttaagagaatgaaatgagaccacgaagattagagaacaggaaaagaggggactggggactacatacccatcagaatcttcattcagtcctgaccctcagcaggagggggatttcatcaggctcatttccatccttgatttcgtccatcctggttctcctgacaaggggcatttatcagagttatggcatgggaaatcacaggggagtaatgtaccatggcatttaagagtatgaacgttggagtcggagctattttctccgctacttactagctgtgtgactttgggcaagttacttagcctttctctgagcctcactttctttatctgtaaagtgagggcgatcagaataaacctccttcatatggttattttgagctttataaagagacaatactggctgagcacggtggctcactgccagtaatcccagcactttaggaggccaaagctggaggatcgcttgagcccaggagttggagaccagcctgggcaacatagggaatgagactcctgtctctacaaaaaatatacaaaaattagtcaggcatggtggtacgtgcctgtaatcccatctactcaggaggctaaggcaggaggatcgcttgagcccaggaggtggaggttgcagtgagccaagatcacgccattgtactccagcctgggcaacaggagtgaaaccctgtctgagagagagagagagagagaaaatactactatggtgcttataaaagttcaataaattttagctgttgttagtattattaaagtaagatctgtatgaaaataaagcagattttttcccccaaatgttcatgtcagaagtatatatttcattggcaaggggctgcttctggaaggttgagaggtatcctgggggaggggatagagcactggcaaaattggcatcacaattcaagtcacctcactcagtgttttttaagttatcaaaatccacagtatgaaaagcatttgacattacagtccactatatttatgcatttataaacaagagaaaaaatcacgaaaaatacagtaccacgtgcagtacacactgattccatctattctttttttttctttttcctcaaatgcacttgccgcctacttattccagacccaatgattgggtccctatccacagtttggaaaacactataagaaatgattgtgtcctctcactttccctctctgggatttagttttccaactataaaatgctcctgatgcccagccagcctcaccgctgctccgagtcaatgccaggaacgctgatttagcacatgctatttggagggtacccatccaggtgctgtgggagggacagagattgagaagagtgctttctgaccccacagaggccatttggaaaccctgggaatgggtgggagggttggaggtggggattgcttctcccctaagactcagcgtgatggaaaggcaatggggtgggaactaactggtgttggtctgtcccatttgtgtcccagcagccttcctgacagcgagataggagaggaccccaggtacagccttgggactgggtcagaagtgggtctcaacaaagggaaggggtagggtgggggtggaggacttgtgggtgggtaatgctgagtatggattcagggatgtgcagcctacatattttcagagacatggggctaaggcctgcattctcaatgagggcaaaatttggttcttggggacagaaaacacttagacattgcaatgctttgtggctgtccaaagtaccaaacagatgccagtatatctgtggtgctgaaatttcatggtgaatggagtcagaaaatagactagcgattgccagggtctggtgggagagagagggaagggactgccaatgtgtatgggatttgttttggggaagataaaaatgttttggaattagatagtggagatagttgcacaacctggtgaacgtacttttagtttcagaggttttctaaacctctgatttttttttaagtgacaggaaagacagaaaaaagtatatctaaaaaggctctaggggtgatcatggaaaagaaagttaagaaatatgactgtaaggaaaggagatgggtgtccctcaggccaggcagaaaattcagtcttgttgctttatgttcatgtgcaaatctaaaaaatccaagtgatatagattaatgaggctctgagtccctcaaaaccttccctccccttacctctccaaaaaacacttgagataccctagaggtggtatgaagtcaggatgggaaggttggctcagctttgcaaataagtttaagcctctggcctttgctctccaacaccaaagaggcttcactttggtatattttctctgccctttctccctccttgtccccaactgtcagtatgtgatgacaggctcagcctctgtaatggtagtgatcatatttcttgagccaaaaatcagacctcatggcatgtgacaagtttgcatatgtggatgagaacagagtggcagaatatttgacacgggagcagcttgggcagtccagggcacatggcactgcacctgacatccctggcagatcccccacattccgtggttgtcttctgatggggccatatggggctgcagatcatgcctggagccctcgcagctccagggctgcgggttcccagccccagagtgcaggtgctggtgtcagcctgcctggcctggcctggctctgtccagagcactccttgccccagctgtttgtgcagctgtatcagcctcagacctcagcctattcattccaacctgaatgcagaggctgggtctggaggagccacattgcgggcttcatactcctgatctgacaagttttccccccagagcctgcaccaatggcacctctccccattctccctcttaactgggtcctccagggccctcctcacacacccacgtggtcaggcagcagaggcttccccaagatgggcacaccccactctccacacctctctatgcagcatttgtggctacagactgggtccaggggattgtaaaggcatgctcatgttgggttggagggagctcaggatcttcctggaggatatggttcactcccatgagagctcagtatgcctttcctcccctgctgcagcccagagcgggagacagcgaccgacttggatatcaggtactgcgtcctgggaacattgccccccagggtcaactccctccagggtgctctcaggcccaagggagccacatcaccctgctgggcagcccccagaccccagccccagtgttgggggaggccagggagggcccctgtgctccaccaggtggctcgggagctgctgctgtttctgtgcatccatttactcccttcacataagatcatttttatctgggatctctttttcttttttcttcaaaaaccacatcactcaaaatgtggcttccttggctctgcttttaaaaaaaaaaaaaaaagttcttccatttggagaattacctgctgacttcaaagtccagtggcttgagggctacccaaagagggaggaagccagaagttgagtgttcccttggtttggtcacacttttgggctcctccctgactaaggaacaacagactgcagggctggggcaggctgggtgtagggcagggaggggatgaggtcctgctgccccagtcagttgagacccagacctctcaaacctgcctgggggaaggcaaggccaccagaggccacactaagcagatttctaccaactgcacctccccatccccttgcctccatctgagccatcagcttgacaactgcctctgagaacaagcccctgagaatgccttccgcaccccctactcccgccctgctttttccaggaagagaggccccgtggcctatgcttcgcagaaaccatggctgctaaatgccactgtggaggagaacatcatctttgagagtcccttcaacaaacaacggtaaaagcctgtcggagggaggcaggatgtggaggggaggaactgtctctggccagcctgccccagttccgggcccctccatcgatcacccacacccagccatctcactccccaggtgcttacctgcactccagcctctccatatggtgcacctggagaggggccaggtgtgcctgagcattggggcaatccagctcccataggggagagggcaggaatggagggaagggagagagccccgctgccttttctctagctggtgggagggctagctagctctctctgtgagtctccattcgcctggctcctgcactattttccctccaatgataatagttagggctagcatcgactgcgctcttactacataccaggcacagtgccgagctctttgtacacggaatttcctctcatgcttacaacaacctcagtaggtagatattattgttattcccactctacagatgaagaaccaagtttcagaaaggtcccaaggccacccagccagtaagtgaccaagatgggtctcaaatccaaagctgcctaacacctaagtacatgtttgtcaccaacatactctgatgcctccatgaactctggctggcacctgcccaggctaagggctggctggggaagtatgagaggaacaggctgggcaaatatttgaccagccatcatcattactgcctaaaccaaccagcagtggttttccctgcagtgccccaagcacgggttccggctgcagcttttcccactgcacagagatcatgagcgccctttcatcacttactctgcatatttgttcccaaccaattccatccttctagtatttaacctgcccaaacgctgtgtgaagtgctgacctcagctcttttcaagctcacacggtgtttgcttgcacccaagcgggaggcctattaaagccattgctcaccctgggcatagctacccagagactaatgaccctctgcaagtgctcgggccaactctgaccaggctgaccagctgcatcccctgcctctacccacgccaggtacaagatggtcattgaagcctgctctctgcagccagacatcgacatcctgccccatggagaccagacccagattggggaacgggttagtagcagcctctgaggggttttttcaaagccaggacccccaacctaccatgccctgagacactactcaggacaatgggtaactaggaaataggagacattgaaggctgaagagttgcctgcagtaaggtcaaacatgttgttcttgatgatgtcctttgacaggttttcagtcctgcttggagggcaaggtcagcttagtgccctcccaggctggggatcttcttcatttgcaccccaggtatacactgagagcccacacagcactgtgctcagcctggggttgtattgttcctgttcatcctccagatggggtcccctccacaagcttagacgaacaggattctcctgtgactgtcctccttttgtgtgattttaatccctgctgcctctgtctttgtttgtactggtcagatggtccctagcgcctacacaatgaatctttaaagacttggggctcatgctgccctcttctgaatgaattcagtaaacacgtgcaagttccttctctatgcaaggtgagaagcaggcaaagaagtggatagagccaggcctccatcccaaagagctcatagtccagtagggtacaggacagtgtctcctgaatggctgagggcatgatgtgttcctcctctttggtgacagggcatcaacctgtctggtggtcaacgccagcgaatcagtgtggcccgagccctctaccagcacgccaacgttgtcttcttggtgagtgcaagttcccttggggtcctggtctctggctgcctcccaggcctaactgcccacctccacctccccgcaaccccaccatcatccaacaatctccctctccaggagtaaatccctcctgccagagatattgccttatcatcctagtgatagggaaactgaggcaggcaaggatagcacaaatgacccattgcagacttcagatggagctctgcagtagccaatgaggagaggcaagctgtagttataggctgcctgtctgtgggacagcccaacccctcaacacttatgcagcccgactataagaatggctgataacagaatgtgtgctgccacttcccatcttatgcccagtgcagacattgctaattgttcacagcattatttcccatggaacttaactcatcctcagaatccttctcaacacagcactccaggtaaccactagccatcaaacatgagataaaactaggccaggcgcggtggctcacgcctgttattccagcactttgggaggccgaggcaggcggatcacgaggtcgggagatcgagaccatcctggccaacacggtgaaaccccgtctctactaaaaatacaaaaaattagctgggtgcggtggcgggcgcctgtagtcccagctactccggaggctgaggcaggagaatggcgtgaacccgggaggcggagcttgcagcgagccgagatcgcaccactgcactccagcctggggacaaaccgagactttgtctcaaaaaaaaaaaaaaaaaaaagaacgtattcgcaatccttacactacttcatgtcaagttctgttgtgtcaggtgccttgactgacactgaagaattctaagaaccagtccttggcctcaaagatttagaatctgattagggagacagagctcacccagttcaagaggcccagcccggttcaaatccaaactgtgcggcataaactatgagggggccttgtccagggagacaactgtgagggctggagtaatcagggagggcttcctggaggagagcctcaaagggagagtcaattaaacagaaggaaagagggaggccatttgcacagtgagttggaagaaggaagctcaagtctctgattccagctttattccctcccctctccctacaccacacgcacaagcactcctttactaaagacacttcacagtgggaagattcagtctccgttaccgtctgacacacacacagcgttttacaaagcatgggtgcattcgcgatctctcatgagatttaaacaaccctgctagagaaaagtgaagtggacattttatttcagtaaacgtttatgaagcgtctactctgtgccaggcactaaacgtttatgaagcgtctactctgtgccaggcacaggcacaagaagtctcagttcttgggagtgccataatcaggaatggacaaacaatgatcagatctggctttgcgccagtgtcacgggaatagggaggaaggaagggtaggcgtgggggtcaggacaggatgcaggaggaactggtgcttaggtgagcgaaggatgggtgggagttcacaaggcagacaaaaggcagagcagcactccaggcagaggaacagctcaggagaaggcccagacggcaggcttcctgggaacctggaatgcagagtgctgggaaagcacagatgaagcatgagtctagaagggaaagcgagaggttataaagcacctggaacaccagcccacagggtttgactttagagatgatggggagccgttgaaggtccaggagtcaggcagtgaagtgattagatctgtttgagagtgatatctgacaactgccccattttaaatgaggtaaccaaggcccagagaggttgggtgagttgtccaaagccacacagctaactagcttcagtccctagagcagagttgatagaactctaatgggttttatactcattgtcacccctccccaccatgcctttccctaccctctactctcttcctctcccttctgcccaggatgaccccttctcagctctggatatccatctgagtgaccacttaatgcaggccggcatccttgagctgctccgggacgacaagaggacagtggtcttagtgacccacaagctacagtacctgccccatgcagactgggtgagggggaacaagggggtcaggctatagggggcagggctggggaggctgtcaggcatcttggcaggaaccaatccgttgtcttggtagcaactgctgagggccacaaagcataagagaccagcactggatggctttatgcatgctgggcatttcagggagaccctgtacaggccaggggtttggtatcacctagacccacagacactccccatcctggcccgggccccccatggtacactcaaggctggcaccaagaagtctcaggaataatcaagtgctcacttctcaccttctgattcctgcccttttgatgacccatccccgcagtcatggggagtgcccatttggatggaaaagccctcttcccaccctatgaccttcccggggtggatggatgcaccaccccgggaatcatatgggaaatatggaaccaaacaatagcagtagtaatagaaacttcaggctgggcgcaggggctcacacctgtaatcccagcactttgggaggccaggacaagaggatcacttgagcccagaagtttaaggctgctgtgaaccatgatcatgccactgcactccactacagcctgggcgacagagccttgtctctgaaaatttgaaaaaggaaagaaagaaagaaagaaacttcaatattatcagtagagtccaatgttgtgaaacccctcattaactaaatttccatactcttcagtaggtagaaaataattactttttgattcattagaaagcacttaatttttaagatggagatcatgtaattttgaactctaggtcttgcctactcctatataaattctcctctaaacaacagccaaaattgaggccctctttgagcttcaggctggtgccaaatggctctgcttattttccccaaaataaatcttccttccatgtatgatgagaccccctccagtataaagaagacccaaagaaaatcacccaaagaaaaaaggcccaaagataagacccaaagacctaaagatttaaatatatatacagatacagaaggtttgtttctgagtttctgtagtgaccttggcaataccttgtagttcaggacaatcctgaggaacacagaagtgctggcttccttgaggaatcagtgatcaggactctcgagccccttgaaccccagcatagggcgggagggggtgagggcagcaggggtgggtgtctgaattaatgtcaggtctacgtgatggtgtcatcaagtgttccagataaaaagttttattgagccgggcgcggtggctaatgcctgtaatcccagcaccttgggaggccaaggcgggtggattgcttgagcccaggagttcgagaccagcttggggcaacatggtgaaaccctatctctataaaaaaaaaaaaaaaaattagccaggtatggtggcgtgcacctgtggtcccagctactcaggaggctgaggcaggaggatggcttgagccaggaagcagagattgcagtgagctgagatggtgccattgcaccccagcctaggcaacagagtgagaccctgtctcaaaaaaaaaaaaaaaaaaagatttattgattccaaagaggcatggccacacacacttagaccagcaggtgctttgctaagccctgatggaggctgccagacccgccgtcaagaggagctaagggtagtgtacaatgagcccacttagtgtatgacggccgctgccgtgggtggagtccttgtgagtaaccagccagcttgagcaggatgcactaatttgctctgcaaacccagccattgagaaatacgcctcagatgtaccgaactctaggtcctaggagtatgttggttggggtaggttatcaataccagcccacttgcagtggatgagctggtggccatttgtagtgaggaaagggatgtgtcaacctccatcttagactccacaattgagggatgtgaccaccattcctccccagccagcccccaaaccacgtttgttgctgcctttccagatcattgccatgaaggatggcaccatccagagggagggtaccctcaaggacttccagaggtctgaatgccagctctttgagcactggaagaccctcatgaaccgacaggaccaagagctggagaaggtgggtatatccagggatggccaagcagccacccctggatgcaaaggttctgctagaacctgaactcataaaggtcttcctgtccttagtgccccaggaagccccctaaagggcagatgtgggagctgggcatgaactggctcctaccagaggagagacagtacctgtgccaggtgcccagggcagaatcaggtgggcaccttcgccttatcctgaggtagtcagatactatttagttgcaaagtttcagaaaatcaactcaaactggcaaagaaaactaagcaaagaaaacaagagggaattaaggatttattgacccatgaaaccaaaaagtccaggtgtgtcatagctttaagtgtgctggatccaggtagtcagtgtaatcagaaatctgtttctcccatctcttgactctgctcccctcaaattggctcagctcccctcaaattggctccattctcatggtatcagtgagggccaccagcagtcttaggtttacattctcccagctcaacaactctgccagaaaaaaagtgcctctttccccatagttcagcaaaagtcccagggctgagtctcactggtccagtttggtcatgtgcccacccctgaacaaatcactgtggccagcggtgtggaatgtgaggattggcctgtcctgggtcacgtgccactttgggagccagatccacctgaatcacagagactaaaaacaggggaagagtggttccccacagggatatgggggtgctattatctgatgaaggggaaggactaaatcctggcaagatgaatgtgtgtctgtctgcccctccctcaggcagggacaaagtagaaatctgacattggtcatcaccagagtagttaccccttaacttccccttcccccaccaaccatatatcctgaagacattgcccaggccacatctgtcttttaggagactgtcacagagagaaaagccacagagccaccccagggcctatctcgtgccatgtcctcgagggatggccttctgcaggatgaggaagaggaggaaggtacaggcaatgggactgggagtgaaattatggcctgaggtctgatcagccacagagaggctaaggtttggggttctgggtgtggtgcagtagtgtgcctttgattaaatggcttccctctgtgtgcccccgttgtcccctcagtaagtggggataaaatgccctgattcaccctcagagggatggaaatgtgtagccacagagtgggttcttgcggcctgcagaggaggcagctgagagcgaggaggatgacaacctgtcgtccatgctgcaccagcgtgctgagatcccatggcgagcctgcgccaagtacctgtcctccgccggcatcctgctcctgtcgttgctggtcttctcacagctgctcaagcacatggtcctggtggccatcgactactggctggccaagtggaccgacagcgccctgaccctgacccctgcagccaggaactgctccctcagccaggtgtgactggcggcccatggcagaggttgggagtggggatgggggaagggctgagcccatgggcaccctggaactccaaatcactctctgcctgtgaaggagtgcaccctcgaccagactgtctatgccatggtgttcacggtgctctgcagcctgggcattgtgctgtgcctcgtcacgtctgtcactgtggagtggacagggctgaaggtggccaagagactgcaccgcagcctgctaaaccggatcatcctagcccccatgaggtacccgtctcccctggccaggctgggactgtgagcaagtcactgttctctgagccttagtcttcccatctataaaatggggatatacaacctgtcacaagcttgtgggggtgactcaaggagacagtgtgtgtaaaagtgccctccttgtgcaagaagcagggagaaactggcatttactcagccagatactgtgataggcattgtgtgtggttagctcatttaattgttaccatggccctttaaagtgagcgtctgcacatccaagtaaagattgttttctcctccctaagtgggtgtaatttgcccatccccacccatgagttcagctccctgccctcccctcactctctctccctcagccagcctcaggttttgacactgggggaacaggtagctgttctattaataatttcctgtaatgggatggataaaaatctcaaaggccacttgatgtcaaagaggtttaaagttgtccctgcccaattggttggccaacttggcttaaaaacacaacaggcaaacagattttctggccccttgtcgaggctagacctcacaatctaactgcactttttactttccagcctcatgagttttctgtggcccacagatatggcctccaagtttatttacttttactctctatttgccccagctctgtagttctgaaactccctggttggggttgggctgactctgggtcagccagccggcaggctgtccccagggccctgttcctcttggcaggttgtccctctggagaggactctgtgtcccaggaggacagctgctgagtcaggccgagccggcagctgagaaaggcggcagtcgtcagatgggcttgagaaactgaaaggctaacgaaaggccagcgcccctttgggcagctgcaggaattcacggggatacaggccagatgtctacaaattggcagaggatgccagacccatgaatgactccagagacacttacatgaaataattaactatctcattcagtaaacaggaagtaaatcaatggacaaatgagtaactcttcctctggctgcctcttaggttttttgagaccacgccccttgggagcatcctgaacagattttcatctgactgtaacaccatcgaccaggtacagaggaccgtgccacactatccccccttccagagacacctcggacccctgggggcttctcctgtctgaggctgggttccccagatcaggtgatcacagccctctgggaagaagccagtgtccccgatccgattataatgctgcttcagggctggggcctccctcgtgggagcctcacagtaaggctgagggaaaccagatccctttagcttccacctgagatcccactggctttctctagtaaagttccagcatattctgaaccaaggtggctgattgtatggagaatattcattttgattcagcctgtgttctttatttaccattgtaccagatggtgtgaaaacaaaatcttgattcctacctcagggagtttaccttgtagctggagagatgagatacgtgcctataataaagggagagcaaggccgggctcagtggctcactcctgtaaccccagcactttgggaggcggaggcaggcggatcacttgaggccaggtgttcaagaccagcctgatggccaacatgatgaaaccccttctctattaaaaatacaaaaattagccaggtgtggtggcaggtgcctgtaatcccaactacttgggaagctgaggcaggagaatcatttgaacccaaggggcagaggctgccgtgaaccgagattacgctgctgcactcaagtctgggcaacagtgagactcagtctcaaaaaaataaaggatcaaaaaataaagtgagagcaaaacatggcggccagtagcactctaaacacagtcaataccaaaattcacctcactctctccccctcgtctccctcagcacatcccatccacgctggagtgcctgagccgctccaccctgctctgtgtctcagccctggccgtcatctcctatgtcacacctgtgttcctcgtggccctcttgcccctggccatcgtgtgctacttcatccagaagtacttccgggtggcgtccaggtgatggcctcaggggtgaggggtgggaggtgctttgcaatgtgcagtttggtgtacttgctagactcatcgttatgagagtaatagggtcgtgttccctccaaaaaataaaaacaaaaaacagaaatgaaggaaatagaaatatccacatcttattccaccgccctaatataatagtctgccaacacacgcacacactgaggttgacatctgaattatttccttgggcgatatggtcaggactggaattgctaggtcatgataaatgcacattttatgcccttcattcattttgccaacatgcttcccaggagggttgcatcattctagtggtcaggctgattgctgatgcatgaaatcggcgggcacctgattcaagcagtgttatgataacacctcccagcccacgtgagtccagagtgtagctgtaagccttgacttgagggagcctctcacagccattctcatggatcacatttgccctcatgagctttggatccatgcacgcctctttcctcctcaaaattttctaagaatgttctctagggagttctttctgggagtgattctcccagattcatagaaactcatagattcaaaaaattgtaggaaaaaatttaaagaacgtctaggccagtgtttctcaaactgccaattacagcccatcagtgggtcatgaaatcaatatcatggatcacaaccagcatttttttaaaaatgaaaaaaacatcagactgtattcatagagtaaagcaagctttgcttcatgaaacctttgtgttggtcatggaggtgtgtgagtactgatttgtgagataaaatatatttctgactgcaggttgtggtcagaaaggttaagtacctttcccaagtgcacatagttggctagaaactagagttgagatacttattagcaataataaaatttagatgcattttggacacaattacctgccccaaaggatcaacatttgtataaatggctttttgcttggatgatccagaatggcccgacacccacacgaacaacatagctttttgacactcaaaaaattcaaagtgctgcacaagctgttctacaaagttcatttcttctgccagagaaacagcccagtctctgtggcacccagtctgaccctggagatggtttatcagggaaatcaacttcctgcatcccaaactggcctccctggcactgatgtgcttgtcgaggtgcagctttggggagcaggaggcaattctgttgccatggaaacctctggccttaccccgagacgaaacctatcatttcagcacatcactggccagggtctaaagagctccttgatggggtaagcggaagacggggttgaacgctttgagtttggtcttctgttcctttggccagctgtctcaaggttcagattgttcacctgtaaaatggaactagcactgcctgcccagccttagctcagctccaggctgtgcagcagaagtacagggacagatggcgacctggggttgacaatgcccaggacagcagtaattgtgccccacatcaggctgtgtctaagcattgtacataaacgatctcattcagtgctcacaaaagctcaatgggctggtggcattgtcttcccccttcacggggtaagaagctgaggcctagagaggtaaggccattcacccacacagcggtagcaggtggagctaggcttcaggcccaggccgagccctgagcctgccctcttaactgttccactctgttccccgccacagggacctgcagcagctggatgacaccacccagcttccacttctctcacactttgccgaaaccgtagaaggactcaccaccatccgggccttcaggtacgagtccacattcccccaaggtaggagtggaacaggggtggggccagggggcacaggccatgagatttgattctcaggactccacttgggaaggccaaggacacgttctctctcaagctgcctcaggtcccaaggcccaagggatatccaccagcagggacaggccaggtgggctcccactgaatgttctagagaggaaaattccagctctgtagacaagcccaggacctctgtgaggcagagcatgaaaagagacaaagctgggacaagtcttcatgtatcaacgctagaaagggccttaggtgcgggccaccctaagcccttcttttattaaggagcccctgtgtgccaaacactatgctgagtactgtacaggccaatcccactcattctgcactgcaaccctcggtgctgagaatggtcatttccattgcacagacaaggaaactgaggcacagagacgttctataacctctctgtgtaaggtgccacaaagcccagacttgaacctatttgttcatgcaacaaacatttactaagccccgactatgtgctaagccccatgccaggcactaaaaagatgagtcaaataagccgctgccctgcaggcgtttacagcccagactttgagcaggccaggataaatccacgtgacaagtattctgaaaaaagcggattcaagggctgtgggagcatagaagagagacagtccgggaaggtttttgtaccagaggtgtcatcagaactaggactcaaaggaggggcaggagttcaccaggctgaggaattcctgaaaacttcagtgcccctgccatcgtctcactaccctgagtggtgatgttggggtggacaggagcatctgaggttgcctggggaatgagggaagctgttgtttcccactccccaagagtctgtctgatctccagaggcatctctcttccagtcaggcaggccagagacccctgacacacaaagttgggctcttttctcatcttcatccagagagtgataataggttatttttagggtggcacagctgcacgaagtatgacagtaaccatgagacaccaagcactgtgtccaggagtaaccatagggcacaaggaccagccaagggccagagaggcttacatctcctccccccaacccctgaagtccagcttcagccctggagaggtatccaggcccctctgcccaccctggagcacctagggccagtggaaatccacctcttagggatcttgtctaagtaaagaagagcagagcaaagctctgccctggccttggcgctgctccctggacatcccttgcccctggacaagcctatgctgtgtcttccacaaagaagcttgctggggactggattatgactctagagtctcctcccagcctcctcttctcaagcctgaacttctcccgttccttcaacttccaggtccctcgacattactgagcctagcctttgctctaagttttggtgatttccctctctcaattggtgtctcagagggccctggggtagagagatggtgactcttctagagtgggccacagccccttgtgtgcagatcccagcttcctgtaaacagcctcagatcaggccaaacctgtggtcagccagagccactgctacccagtgaggtcttccacaccctactgacacggtgaatgatttttaaatttgaatgaaaggctttttaatcaaccccatacacatttaatgcattggctttaatccagcagcctgttgagagctattagcacttattgattgcccacttactgtatgccaggcaccgtgctaagtgttgtatgtgcattattacatttaatcctcacaaggaccacataacataggtacgaatcgccacattctccagatgcagaagcgagacccagagaggctgggtaatcaatccaaggtcacacagactgcgggggctggcgctgagcttggaacccaggtttgcctgaccttctgggctttcctaagagatcttattttttcccaaaagagtttcaagagtgcccagcactgggctcagtggcgggctcggaggttgttttcgttcatgtaggaactatcacttccccatttttttcataagaaaactgagtctcagtcctgatacacagccaggaagttgtgatgttcaggctccaacctgggtttacatggctccgaggctggggctcttttctagtcctcagacacactgtcgcacgcctgtggcagaagctcccatctcacacttgccgaccctcaactcacacagtcctgagacccacatacgctgagcgcctcacactcctataacacgcacatgccctgatgcacacacattttcaacacgcacttactctacccttcaggcatggtttcacactcactgcagacacgtcaccctcccacacgtctccaccctgggggtgtgcagtagcatgctctctcccacctcagaacctcccttcagtcccctcagacacatgccctctctccacgcagagacaatcaaagctgaactaacaccttccagggtgaaaagcaaatgcccagtaaggtacgtcttgggtgcctccgtgtcccctgagtttggtcctatcaaaccagcgatgatgaggcagcttttctttcgttccttcctccatcatcaaacaagtgctcctgcatctcctctgggccgggcctacgtcagcaaggtctgagggaagcggccaaggagagtgatgacggcagcccaggttgatcagagaaaggaggcaggtccatgcgcagtaactcagggaaaacatgatgaggacctaaggatgagaaagaagcctccagagttccctgtgcagagagattccatcaatttcagagggtcaggggagtgccatgcattcatccaacaaatatttattgatagtgccaggtgctggggtatattggtgaataaaacatcttcatggaatttgcagtctattgagggagatgattataaatagctagagaaatgcatgtacagcagatactgtggagcaaacaggttgcagacaataataggggaaacctactttatagtaaggtagtagccaggaagagcctctctgaggaggcagcatttaaggcaagccctgaaggttgagttgagccagccttatgaagagcaagggcaaaagccttccaggaaaagggaatagtgtgtgcaaaggccctggggtagggaagactttagtattgtcacagagcttttaaaaagctgagtggctgcagcatagtgtgtggggtgtttgtggcaggaattaggttggcaggagggggttcttcatcctataagcagtggaaggtcattaatattcttttttatttgtttttttttttttttttttttttttttttgaggcagagtctcactttgtcacccaggctggagtgcagtgaggtgatcttggctcactgcaacctccacctcccgggttcaagcaattatcctggcttcctcagcctcccaagtagctgggattacaggtgtgcaccaccatgcccagctactaatttttgtattattagtagagacagaattccaccatgttggccaggctggtcttgaactcttgacctcaggtgatccgcccgcctcagcctcccaaagtgctgggattacaggggtgagtcaccgcatccggccggagatcattaatattctaaacagtgggggagaggacacagtttgcgatttagatagattaagccagccactgtgtggagcatggactgtagggagacagcaggtagacgtattcaggaagctgatgcagtagtccaggtgagagtttgtggtgggcaggaagcaggatagagggggagggaggcaaggactcttttagagagagacataagaggacttgccaaggggctgaatgtgaatccaggtgattcctgggtgagaaactgggtaaagggaggtgccccttattataatgggaaagacctagagaaaatggatcttggggtgaaaacaagagtttggaggaggtggggattctggacaggtttgaataagcagaaaggagtggggtggacattccagagagggatagcttacatgaagtggccacggtggcatgtctggggactggaggggccctggagcctccctctgcaggtagggagactcctaggagctatgtggaccaacactgttcccttaggagcttctcatcctccctccaggtatgaggcccggttccagcagaagcttctcgaatacacagactccaacaacattgcttccctcttcctcacagctgccaacagatggctggaagtccgaatggcaagtgctattcccctctaccctggcctctgataggagggtggggccagagcaagagcacacaggtacctggggatgaaagagaggataggataccagatcgtgtggacaccaagccttcctgcttcccccagccctggtggtcctcctagtgtctagcctgtgctccttttccccatatcactgcctggaggcttgtgtatctgaggtgtgtgccagtggcaagaacagttgtggtgaatgtgtatctgcagtgggtcatatgacacccacattgtgtgtgtttgtgggccagctgaggcgtgcatgttaaagggtgtgcaggggctagggggtaggggagcatgagcttgtgggacatgttggctcctggggctccagccttcgcagcccttgtgtgtgtctggtgacgtgtgcatgagttgcagggctggagtggaggcctggctgagctgctctctgccccgaaaaggagtgaggtagaacaggggcctgtggctctaacccctgagcgcccaggtcagctcctctccctccccaggagtacatcggtgcatgtgtggtgctcatcgcagcggtgacctccatctccaactccctgcacagggagctctctgctggcctggtgggcctgggccttacctacgccctaatggtgagcggcagtgggctagggcagaggaggggtcagacaccagcactcccggagcaccttcgtcactggagacatgagacactcccaggccttaccccaatttcatttgcatctgatgccagagggacagtgcgggcaggaaggctgaccagcaggccccagggcccaggccccagacaggtggaggttggggagccacatgactgaccctccctgtgcctccagggagggctgctctgagcaggcagtggatggcagcaaaaggaatctggggccctggcccctctccagccttaagaagagccattctggtggctgaggacagaactaagcgaccatggagtgtgcgccactggcttgctccccacaggtctccaactacctcaactggatggtgaggaacctggcagacatggagctccagctgggggctgtgaagcgcatccatgggctcctgaaaaccgaggcagagagctacgaggggctcctgggtgagaggctcagggagaggggtggggaagagtccaaggaggagtgtgtctgggttgggggccacaagggagcctggggatggggtggcactttcggatactagctgtggcccatgcctggtggctgagcccagcccggcccccagcaccatcgctgatcccaaagaactggccagaccaagggaagatccagatccagaacctgagcgtgcgctacgacagctccctgaagccggtgctgaagcacgtcaatgccctcatcgcccctggacagaaggtcagagcacgggcccaacccaatgctgcaggacaggcgtgagcaggggatggggcatgcacggagctggatggcttcgcagtcacctcgtggccctccagggccgaggcctctcactattcagacatcgcagtctcctgccctgggcctgtgggggcccatctttcctctccttctattgccttcccccagtgctgccctcaggccttgtcttctcactcatccaccaaggagaccgacactctggactcccccagctcacacgggctttgtcagggcctccctctctgcgaatggtcaggggctttccctagggcactgccccgagcttcagggcagggacctgggggcagacagcgaggccacccttgtattgagggtgagcccctgcctatggccctggcccagctctcctctcgtttcccactctgtctctttgtctctgtctcactttgctgtggctgtccatgtcattctctgaccttgggatgtacctctgtccctgcctctctcatccttctatgtcactatctgtctccgtattgtaatttctgttggtacccaagtgccaggaagcaacgggatcagaggtggctccattgtagggcggggcacacagacacatccatgcataccactctcagctgcccctgtgtcctcctgccacacccatgcccatagagacacaccactgccccccagctctccttcagccaagtacccggcacacccagacccacaccaaggcccaggcaaatggacatccatgcctgcacttgcgtgccggtccctgtgtaagccctctctggacccactgcaggaaacaagcccaaacctgtggtgtccaaagagaaactagtcagaaaaccaggccaaaaagataccctgtgacctcccacacctgcacacacacccagagctagcatagaggctattcccagcagccccagagtcccagtggcggtgcctgcttctctctttccagatcgggatctgcggccgcaccggcagtgggaagtcctccttctctcttgccttcttccgcatggtggacacgttcgaaggtgagttgtaaggcgggcaccccacgtgtacccacagccaccagatgaggcctcagccctggcacgtggtcagacatgacaggaggcccagcagtcaccgccttcccctgcaccctcactgggacccatgcagggcacatcatcattgatggcattgacatcgccaaactgccgctgcacaccctgcgctcacgcctctccatcatcctgcaggaccccgtcctcttcagcggcaccatccggtgagccccaccacccctcaggcccacccagccccaggccggctcagttccatcagatctggagcacaaagaggagggggttgggggagaccaggatcccagaggtgtttcctgctcatgcccttctccatcccatcaggcccaggcagcctctggaaggggatcccccacccatgggtctaagatgctgtcccccacccactgccaccacctcggtgcttctcccagccagacctccaactcagtctgctctcgctcactgccctctttgccgcctggggatgcaggcaggaccctgctccctccctactggggctttctgtgccacttccagatttaacctggaccctgagaggaagtgctcagatagcacactgtgggaggccctggaaatcgcccagctgaagctggtggtgaaggcactgccaggaggcctcggtaactactcctggctatgcagctgggttggttgggcactcaaggaccctgtaaggatggcagacagaagcccgtgtctcaggtttgccccaagtttggagtctgaagcctggcaggaccatttagtcctacttctcactatacgggggcccagagaggtcaggtgtcttgccccaggtcacacaactggtcagttcagggtctggctcctcctgcagggtacagcgggtacagtcagggatccttgtgagacagagattgcgagtcccccatgccaagggggcatcttcagccctgccctgccccatccacctgcatgcccagttctgccttaggggaggagaagatggactgggcaatcatagacacgggtcactcatcaaggccaccggtgattggcaaagccttggtatatttgctgcagctcctggagcattgggggtggccaagccttggtttcaatgaatcaccctaccaaggccctacatacacactcagtgcacccctcagtgcacacgccccctcccagaactgcccagggccacagcagcacacacctccaggggtgcccttctcgttgcagtccttgcagacggcctccacattgttgtgtcaggtgcaccagccctgcacacgcctgtgctcttggacacacacccacctatttgcccccatgcacacattttccaacagccccccaagccatcccatctgctccactcacagcacaagattaactcagtcctacttcatctccccgggctgttttcagatgccatcatcacagaaggcggggagaatttcagccagggacagaggcagctgttctgcctggcccgggccttcgtgaggaagaccagcatcttcatcatggacgaggccacggcttccattgacatggccacggttggtcctgggcccctccatgggaccatggtcttggaaagggtttagtgggatgctagggagaaatttgcacgaagtagtcctgaggctcaagttgcctctaacatcaaatgctatgtgttgcagaaaatgaaaagagctggggggaccctgactctgtctagtcttagggaatgttacacacacacacgcacacacaaaaacactatgcaaacacacacataagctgcacacacagacccacacagacttcacactgtcacctatcacaacagcacacacacagccacaaccacaacctacatacacacacagagctgagctcccaacaggctgagtccagtccctgagtgccgggaacctgttcagtcctgtggggtgggggtgggactaggatcggggtcagatgggagctgagccacagacctgggctccacatcccccaagccaggccagaccccatccactgggcaggtgagccaacagctgttgcccccacttggcaggaaaacatcctccaaaaggtggtgatgacagccttcgcagaccgcactgtggtcaccatcgcggtaaggggcccattgatggggtgcagagggacacccagggacaggactggcctgttgtggccgtcatcagtgcacagcccctgggcttgcctggtcccagtaatcaagaaagaaccctgaagcaggcagttcagggcaaggggcctggagggcatgcagggagcctgggttgcaggatttggggtggggggttttgcccctgtgcttccctcagacctcccctctccttctccaggttccaaggcctgcccctgtcccaaggccttatatgttaggctggcgttacttctccataggaagtgggggaggggttgtggagggtctctgagccttgaagcctggaggtggggtagagttgggacttggagaggagagaagggtggtattagcagatggagagcttgtagtcacatccaccccaggaaagtgcagtccccacagtgacaggacattctggccacatgcctcatcctcctcctccaagccgcaggagggccaccctcagctgtggcccccaccgcgggtggtattcccaccatcctgacccgccccctcctgccctgcccagcatcgagtgcacaccatcctgagtgcagacctggtgatcgtcctgaagcggggtgccatccttgagttcgataagccagagaagctgctcagccggaaggacagcgtcttcgcctccttcgtccgtgcagacaagtgacctgccagagcccaagtgccatcccacattcggaccctgcccatacccctgcctgggttttctaactgtaaatcacttgtaaataaatagatttgattatttcctactagaggccctaagtctggtgggcaggggctggcggtggatggtgggttcagtagaaccagcctggctctgacatcaggcagaagctgtgtgagcaaaagcctgcttccttacctgtgaaatgaggcctctattagtcagccaggctgccacaacaacatatcacagactgggtggctttaaaacagacttttttctcacagttctggaggctgaagtctgggatcaaggtgttggcaggtttggtttctcctgaggcctctctccttggcttgcagagggctgccttctggctgtgtgctcacatgacctttactctgtgcacatgcatccctgctttctctctgtgtcttaaaaggacaccagtcatattggattagggccccac

SEQ ID NO: 15325 - DNA, 68743 bp, Homo sapiens
ctgcccacaagaagcccatcgacttgcgagccatcgggaagctgcccatcgccatgagggccctcaccaactaccaacggctctgcgaggcctttgacgcccaggtggtcagtgggggcacagccacaccatctattcactgccttctggtttagggtcacagagagggacctcaaagggcattaggtcaaaatcctggtgggacaagaggggaaactgaggctggtgaggggaagaagcttgccttaagtcacacagtgaaccagggacaggtgcagggctgaggattcataggacaggcacagttggaatggcccttaccgtttaggtcgtctagtccaaagtccttatccagatggggaaactgaggctctgagaagggaagtgaccccactggactctcacatccctgtgctctttcctctgcagcttactgactataaaggttggagtgttcacttgatttggagcaggggtgttagtggcctgatccttatggtaactctatgagttgagccagacaggaatctccccatatcactgaggagcaaattgaggccctgagaaaggctgtgacctgcccagagctggccacagctggcaggcggcagaggcagtctcctggctcccagtccagtgctccttcacttcctctgccctcgcaccagggcagttgctgaggcagacacggtggcaggtggtaatgagtgagtgtggcacatggccacctcctcattccagtgctgtgctcatcacatagtccctgaccagctgtgtgaccttgagcaatcatctggccttagtttccccatctagaccatgttggtgttgatagggccctcccaactgtgcacttgctgattccatgatctcttcctggagttcacctatttgcagaggatgtgaccactgggtttccccagacaacaggagctaggggcatcctgggaggctaggcccagccgtgaattagccctcaggcactctgacctggccatggtctctctgggcagcggaaggacattcagggcactcaaggtgcccgggccatctggcaggcactcagccatgccttcgggaggcgcctggtcctcagcagcactttccgcatcttggccgacctgctgggcttcgccgggccactgtgcatctttgggatcgtggaccaccttgggaaggagaacgacgtcttccagcccaaggtaggcagccccaggggtagggtaaggcaccctctagatggttttcagttgtttctgagagtgcaacaggccaatgtgtgtgagccatggccacactggagtggctcctcacacatgcgcaaagcccatagcagtatccccaccacagaatactctacatctggtcaacagaaatgccagagggcgagcctatgccccaagggtatcctactctcctctcaccgtcactaccatagtacctctcccggtagttaggtcagtccgaaaactgcaggaagtgcttttgtttgtccagtgtctagagcttctgtgacttggatttgttggctttcagttcatgtcatcttagtaaactctttaaaagttttcaagatctgtcttcttcagtcctgtaaaggctggcacttgagctttctgcaggggcatcttgggagctactgtcagaggagagagaagtgggaaaccctcacgagtggagctttgtctctccccactccaaatttcattcaaagctgcccgtagttttattaatatgttggacttttccattaaaatttcttttttaagaaaagtttccatggcttaaaaaacactggagacttattagactagattatatccaatggccttggcagttgtaacgattctgcaaactgaaatttgttggagctagaaaacctttccccggggttatttgccctgcgtggggccgtagcatccacttcgggggctgggcagactgtgctctgttgtctgtttccttgcagccgtttaggtttaaatggccacaaaatgaaaactttttcacccctaataagtttcagagttttagtttccaagtgaggatgtcattataacattttaaccacagacagtctgaaaataatgcagagaatggggaattagggtttttaataatttatgacaccctttgcgtaacatttgttcatctcatgagctccaaaatcgcagccagcagttaatcctcaggaggtttatgttcatttttctggagacataattagtcagctgaacagttttggccacagatatgagatacgttgagtctgatttatgcagcaaactttcattgaacactgctgtgtgccaggcctgggttgggctgtgggaatatgaaagcaatagttatgatgaggatgattaacaatattaacagccacttactgaccacataatacatacctggctgtgtgcaggagttatccatgtgttatttaatccctaaaactatcctttggcgtgagtatattttgcaacatctttactgtggtatacctcaaatactgtacagtttatgagatgataggtattcttatccccattttacagatgagaaagttgaggctcagaaagtttaagtaattttccccagggtctctcagctagttaataacagaggcagaatttgaacacaagactcactccacagtctgggcatttacagccaggaagctaaattgactattattatcaagccatcacctctggctccaaggattatgaaatccaacagtgaggagagaaatcaaaataaaatacttttatgctatgtgttacatgtgactcttaggaggaatattcagggaattgtgggaaaagatagtgattaacttagccagtggtcatgaacagcttcatagaggaggggatgtttgaaaggggtcttgacggatgagtaggaatttgccaggctgccatgggaagatttcttgctcaaccaagaatgcaaggaccacttttgcttatttaaactttgatggcttttgaagccatatctggctttttgagcctctctactttacctggcccataaaagagaggggaagcggctgcttctcttgtctacaggagtgtcacctttggctctagcctgaccataggctaccccagaatacccccattggcgatcctgaagcagcatggagccagttgttaatatcagggggaaatggcacaggccagagcccttatcagagtgtccacaccacgctcttcttcctgtgtttcccaaaacccttgtgggattctgctaaggagagagctctgaggcaggacgtgccaaagagatggcgaaagcacttagaattttagttcatctgaacgttatcattgccgtttttttctctttgtttatacacaaaccctggggtttattaccgtctcattggaatgctcttgtcccagttacttagcacacaaatccctgagacagatggccctgcctcagtggcagtgggccttatcagatttaatattttttccctgcagcccaaacacaatcagaaaatttccgacacagaaacaagagttgaaagtaaatatagtctccagtgtccgcaacaaagaactctccatcatgtggttgcctgggatgtggcttaattctcatgtgggcttctgagctcagaaaatgggggaaagggatcatttactgagatcatttggttcatctcccagcccccaagccattctaatccagagagaaccgagtgctattctggtctttatgaatgacaaagaaggaagctccctagctacatgttgcagtgtttcacagtctgggagaggaagccgttttttctgcccagcctgaatccatcctgcagcagttggcacagcgaggcacctgtggtttattcatcatcactcttccttcctaagatactcagagttggcaagaaacatgtcatccttggtatccgcaaggacgaacatttctgatgtcctctttagttactgaaagtgtctgtgacttgccagatctttgatgctcctgtcaccccgctgccactccccagggaaagctgggacccaggttgggctctgcctatgatctatagctctttccagcctcctctccaacccaacccctactcccaatctgtcacctcccatggatgccactgatctggctgaaggacaagagaattagattcataatgagctgctggtgtctgaaacctgccagcactgccctgggctatcagttgagccaaaggaagaaggaacagtctgggtttgatcgaagggctaaagcttcaaacagcctctaagtctcagtaggaaaatgtgtaggtttgggagggtgtatgtgtttccgaatgagttcccctaagaactgcttatggttctatatgtgtgttctgtttgtccctgtgtcttttggtgtgtctttttctgcgtgtgtgtgtgcatgtgtgtgtgtctatgcccccgtttggattgccatatttgtggctatcattatgagtgacttaatgagtgtatatgcattggtgtttctgtgactttgtggttttgatgcatgggctggcctcttcataaccatgtccatgcagctggtctggcctagagtacctgccttcaattcactagctccttcttggccatcaagactctgctcaaatgtcacctgctccagggagccttcacctggttgaattagatgccccttatctgtgctcacataacatcctatcaaagcgccctgtttctttccctgacttgatcctctgtcccctattgcctgacctctgtgtgcccagcactcagcccactgcctgacacccaggagatgcacgggaaatggttctgcaaagaaggaataatgcagcaattactatatattgagtgcttacacttactgttttttcacatgcactgttacattgacttctcataacaactctctgaagtcccttcatagcctcaccttacagatgaggaaactgaagctaagagaggttgaggaacttacctaaggacacagtggctaatatatgatgagtcaggacctctaagtccaggctcttaaccaccgtgtcaaacagtcttgtatgaatgggtaggtgtgttggtctctgggtggccaaagataattttattctttacccagggcctcccggggctgggacctacggacaactcaccttttgacacctgccaaaataggaaacaagagtccaagtgatcccctctcctttaagcaccagagaacatgtgaaggggacctttccaatcatacctctggcctggcagagacaatggggctccaaactgtagagtcgggagtgctgggttttagtcctacctctgcagctaactcatttattctcctcagcagtcacattctgcaagcctcaaatgcaaaatgtgtaataacttctgtagaaagtacatgggggcatgaagatcattggcttgattgcttttaaaaaatcggtattgagcactactggggaaatccctggaaacaaacacaattcttccctgagagcttgtgaaaatgcaagactagggcctatgattttccaaagcattttcttccaccaagtgtcaggttgtaggtccttggtcttttctctcttgccttggtacctgcagggtgctgaccagtgctatcatatcccctccccgtttcctaggaccctcttctcggtagactccaacagggcctgccttccttgggcagcatggcaggcctcttggctagtctagtacccacttcttttttttttttttttttttttggatggagcctcactctgtctcccaggctggagtgcactggcgcaatcttagctcactgcaacctctgcctcctgggttcaagcaattctcctggcccagcctcccaagtagctgggattacaggcatgcatcaccatgtccagctatttttttgtatttttagtagaaacagggtttcagcatgttggccaggctggtctcaaactcccgacctcaggtgatctgcctacttcagcctcccaaaatgctggaattacaggcatgacccaccacgcctagtcaggtacccacttcttaactgaaacttagctattccaggttctatcccttttaaaccaactctttgaagagaggtctaataatgacccaatgacttatagctgcagtgagatttttattttaacaggtcacaaaattctcaatccacaaaagtagatttctgaccctaggttattttgttgggggcggagagaggaagtcaaaggttttgcagcctttagagctgcaaaaccagaatttgttgttttgttaaaaatgcacaaataccgacgagtatatttaagtaacacccatagtctaacgaacaaacatgatcagttggcttttccagccctcattctccagcctgtgtgttttctgctcattgtaacacagcgtgtgtgtggcattccatgtttctccagagctttcatgagaatcagtggtcttggatgcatagtgttcccatgagtaccttaattacctaaccattccctgtggttggaaatttatatgggtttttgcattctccttctgctctgaccccaaaataaatgtctgtgttcatacagctattaccttatgtgaaattattttctttgggataaattctcatgatgtgttgttgctttaaaatagtggactccagtctccagagctgcgtctctgcagaggacagtgggacagaagaatcccagggcatgttaaaaaggaccgggtcttcctaaacccacatgcctatatttctgacccagtaccagccaggggggcaagtttccatcccccacaagtcacaaacctgtaactgacactaggatgcttaaggtcaaaggcctggacgaggcctagacagtgggtctggggtagtgtttttgacatcactcaggttcatgttcacatgttgtccccttaccagcatgtgaccttgggccagccactaaccctactgaaactcctttttttcatgtatgaaatggggctaataatggtaccctcctcattagggtattgtgaggatagagttttgcacctgataaatattgtctcctgccccttcctcccctggaaattcaggtctctccctgcagcctaattttaaggcccatttttctgcttccagcccacccctgcccttctaccttcgacctcctccctctgcctctccctctggtgcactggcaaatgggacagagagcctcggtagggccttcctcttagagtcttgcacgcatccctcagtggtctccctgtggctgcttcctgctgccaccaacagatacagacccctgtcgcacagatcatggtagagacagtggtgagcaggaccagacagctccagggagcagtgagggctggcttagagaacctctgttaaactgagaggccaccatcaggaagctctgatccaagatccaggaatccctgactctagggaaaggcctccaatgagagcctgggccctctctgcctgattctgattgtggatgtgccctcaaactccttctcatcactttgttccatccctctttaccctgcagcagctcccacaccctgccaaacaggatgcacagtccagggcagtgtctgagaaagagcagagatctgtcttcatggaaatattgatgtggctctgctggggagcaatggatttatcaagatcaaagttttcctgggagttattgatgcttaatttggaaatagacacactgttgatccctggtatctttagcaacaaagttaaaatgtttgtttttcttcactggttgccatctgagatcttgccggaagtacacaagagaaccttaaatttaacaggaggccctgggagcccatgaggctggcgggcttgggtctgaaatcttttcagtctcttgtaagtgatgagctctcattctctcctgagagctctacggtgccatgttttccactggccttttctgctcagtaattgctacattacaggctgttggtaagttcggaacaagggagctgctgattccatttctgtagcagagaacatgcaccgtgagacttgttgtaccagttcaggttttaggtgctctatttattcttgccccattcagaatgctctcccctgggtctgtggccacaatgctaagagtcatatttatgggcctgcagttgtaattgggccccattctgttcccccaagtggaaagatgaacagggtgtaagcaaccttccctgtagttagaaaaacgtttagttggatttatcagtctgatttttcactcataaacaattgcacaagcctttgcaagcccagagggtcttgtaataatgatggccgtggtccattatggcacagtgatgtgttctacggtggtcattttgctggcaatgacagtcacctctgaacttctctttccaacagacacaatttctcggggtttactttgtctcatcccaagagttccttgccaatgcctacgtcttagctgtgcttctgttccttgccctcctactgcaaaggacatttctgcaagcatcctactatgtggccattgaaactggaattaacttgagaggagcaatacaggtacttggatgattattttttcactttgccataagaaccattattaggaataatgtccatgagtgttattcatcctcatggacactcaagaataattctgctgtaaatttattttttgttgcccattaacgatgttttaaaacagtaaccattgacaaggcagtgtgggatagtggaaaatatcttgggctgaacttgggagacagtgtagctctggctctggttctgccttggactgggtctgaaaatccagctgctcagcccttggcttgaaagtggtagacgtcactaattgatcacagcactctttctgaccaagggtaaatgcaaccttggaatcctctctaagtggctgttccagagttctgctaccagacagtcttctttgggtgtgaaaaaaggaatgtgcttgacatacaaggtctagatagcctctaagacagggtcccctctaagatggggtattggtccatggcctgttaggaactgagccacacatcaggaggtaagcagtgggagcaagcattactacctgagctctgcctcctgtcagatcagcggctacattagactctcataggagtgcgaaccctattgtgaactgtgcaggcaagggtctaggttgtgtgttccttatgagaatctaatgcctgatgatctgaagtggaacagtttcatcctgaaaccatccctctcccccaggtccatggaaaaattgtcttccacgaaaccagtccctggtgccaaaaaggttgaggaccactgctctaagttctatttgaacccttaagtcttgctcactaatgagagtgacctatttggtctgttgggtcacttaagtctaggctcttggtcctgccttctgtgatttccttcttagagtttctggaaagatgatcaaagccagggagtgttcagggcccctctgaagaaggtgatgatgagagttgtccaagtcccagggtcttcactaggattttggttcagctatcagactagagagacatcctgattgagagtagtttaaatgggatagaagtttgtttattcttcagatagagtcagggctgacacaggagctactcaatgatcagagacctggcttcttctgtcatgttgctctgccagccttcttttgtgacttttgtctccatagccatggtgggtattgaaactgccactatatttacatttaaactagccagaagaagggacaagaggagggaacgcattttccttttaaaatggtaatacctgatttgcacataccctctcgcatcccattggtgagaaagtggccaaatggccgtatctagagagtctagaaagagcttggtctttattcttgacagctatatatgcactgctagaaattctctgtgcaaagaggagaatgggcattgggaataactagatgcagctatgcctagtgatgtccatgaagttgtggtaaaatcctgaagctaccttgttctttggaaatgttcctcagaatcattaacattagtcatgtgggagacaggagaagaagctctgcagaaaagggaccgagaggacaaggatatagcttgggctggggacaatgtcagagtccaaactctggctatcttggaatagtctgtgtgaacggtgccctcccaagttgtgcagtgcacaacctgtgcagctatatatggcaaccctgcccatccccagtggtttctcactgggaaagcagagtatttcctcagggatgtcattatgtgacaatagtggaaaaagcccaggaaaatctaagaccttctaagactcatgggggcccagagctgggaggaaccaagctgttgctcagttcagaaaacttctctagaaatcccagcctctcctcacacccctccagtgacaggcagacttgcaccaccacaagcaacagccacttttgtggttgggcagttttgtaattaaatatactaatgtgtgtatgtcataaattacattttccaattatgccaaaagagccaaaaatggttttttaatggttagcatataatcgtttttatcaaattgcttgaatctttcatgttaataagagagattcattactatgccacaaaaagcaaatactggcattaattatagaaacaaattaggggggtggagcgcaatggctcatgactgtaatcccagcgctttgggaggctgaggcgggtggatcacaaggtcagaagtttgagaccagcctgaccaacatagtgaaaccccatctctactaaaaatacaaaaattagccaggcatgttggcgtgcacctgtagtcccagctactcaggaggctgaggcaggagaatcgcttgaacccagcaggtggaggttgcagtgagctgagatcgtgccactatactccagcttgggcgacagagtgagacttcatctcaaaaaaaaaaaaaaaaaaaaagtggctcatgcctgtaatcccagcactttgggaggccaaggcgggtggatcacaaggtcaggagatcgagaccatcctggctaacatggtgaaaccccgtctctactaaaaatacaaaaaaaaattagccaggcatggtggcgggtgcctgtagtcccagctactcgggaggctgaggcaggagaatggcgtgaacccaggaggaggagcttgcagtgagccgagatggcaccaccgcactccagcctgggcgacacagcaagactctgaaaaaaaaaaaaaggaaagaaagaaggaaaggaaaggaaagaaaggaaaggaaaggaaggaaagaaagaaagaaaggaaagagagagagagaaagaaagaaagaaagaaagaaagaaagaaagaaagaaagaaagaaagaaagaaagaaagaaagagaaagaaagaaagaaaaagaaaagaaaggagttagggagaaaaaaaccctttctttctttcttttggagatttccggaaaatgtacccttacggatgagagcctgtgtcttcatgggttagagaataaccacgctttgtgcataaaaagttattaagcacaattcctgaattatacataattactagctgtcagtcagttgtgcatttctgtgtatgctggtcttcacttaataagactttatttcacagatcacttggtgtccctacttcactgaaactaggtgattatcttttgaagtctcatttcacataacctaggaggtatatagatttctttaaaaatgtcattgccattattttaaaccttacccatggtatatataaacttacagaaagacagaataggttcattattttaaaccttgcccatggtgtatattagctcacagaaagacatagaataggttcctgccttaagaaaacctgacccacaaaaaagcctgggtttacacaaaagaggaattaagggcggggagcccaccttacaacagaatgaataatagaattttatccaagagcaggcatcctgaggacatttaagacccggatgcatttttccttgttcaagagcacacatccaaaaattgcagtctttctgcgagtcatgatcactctgcacataaagcgtttaggttcagagctcggggaggccattaccatggctgctctctgtctgccctgtgagggtccttggggtggctgcactctggggatggtgctggggctgactgactcacgcggtcgtgtaacacatcagaccttccaaagtcgaacccttgttttgtttcaaggctcaattatgacaggacttggtctcagagcagatcccctccctaggctggagaaggccactttaaaacagatggcctgccccacttcatcatttttatggctctgatctgtgttctccactggcctctggtaaatcaagaatacaagtggacatgaagatctgctttaaaaaataaagaacagaccgggtgcggtggctcatgcctgtaatctcagcatttggaggccgaggtggatggatctcctgaggtcaggagtttgagaccagcctggccaacatggcaaaaccccatctctgctaaaaatataaaaattagctgggcatggtaggcacgtgcctataattccagctactccggaggctgaggcatgagaattgcttgaacccggaaggtggaggctgcagtgagctgagatcatgccacttcactccagcctgggaagcagagcgagactctgtctctaaataaataagtaaatgaattaaattaaataaaaataaagaaccaattaagtcctgtctacaggaaaaggccttacttgctggagaagtagcttgctgtgctggagtagactagtaagttggaacggtgatacagtaccaccttacagagctgctctagggcaccatggggactgtctgagaagcccctggcacactgtaacaggtggcatctggtgtggtgatgatgatgagaatgatgatgaatgtgaaacactctgctctcatttctagaccaagatttacaataaaattatgcacctgtccacctccaacctgtccatgggagaaatgactgctggacagatctgtaatctggttgccatcgacaccaatcagctcatgtggtttttcttcttgtgcccaaacctctgggctatgccagtacaggtactagatgggctgaggggaagggaggggggcagcaggacacacaaccagaatctgctggtccatggccagtaactaggagcacaccgtcttccactccatgcttgcctgtacctttcacacacttggctataccacaggctgtacctctgggtccctcctgtcccatactctgcaagcactgaccatctctcttaatgaccagagaaggcagtatcattaagactttaaaaatggagccaactttataaactatagaaaaatcaagccaggttcaggggctcacacctgtaatcccagcactttgggaggctgaggcaggaagattacatgagcacaggagttcaagactggcctgggcaacacagtgagaccccttctatgcagaaaaaaaaaagaagaaagaaaagaaaaatcgtacatggaatgcccacagatcttaaaagctatgttgtagcaaaatatttaattacatcaaaaagtgttagtgatgtatttttaagcaaaaagagtaagttacaaatagtatatgttgtatgcttactactaaactggaatatatgttatgtatacatttgtacagattcacacatgaaaaagaattggaaaatcacatagtgggattataagtgatttttattttctttatgtgtttctaaattctctaataagcgtgtataagatttggaaatcaacaacatgatacttttagcctaggcaacaaagtgagaccctgtctgtacaaaaaattagctggaagtggtggctcacaactatagccccagctactcagaggctgaggtgggaagattacctaaagtccaggaggcagaggttgcagtgagctacaatcacaccactgcactccagcctgggcgatagagtgacaccttgtctcaaaaacaaacaaaacctggtgttttttagccagatgtggtggtgcgcccctttagtcccagctacctgggagtctgagatggaaggattgcttgaccccaggagttcaaggctgcagtgagcaatgatcacgcccctgcacttcagcctggacaacagagagactcctgtctcttaaaaaataaaaataaaaacgttaaaacatggtatttttttaaagcaagacaacctttggtgctggctcaggaagaggtacattaccccccaataatcagaggagaatcgtcagcatgattgatctgacctcgggcttcatgtgtcccatctcccacccggagctcttccaccacagagtctgatcctgtcctatgcctgggactaaatcttcaccctggtgttcaggccagaaaccgaaatcccagacccattcccagagggcgggaaggttccaccgggagagcttgatgtagcagaaagtgacttgggtgagacaggctgattcaaatacttaacctctctgagccttggtttctttatctatgaaatggggaggctgcccaccctctggagttgctatggcaattcagttagataatgtaagtaacacagcaggcagagtggcccccagagtcttcacttcgtaaatatcagatccctctaccttgcacatgtttggtatgagtgaggtgttaccaatccagaatccattgcttcttgggataaagattccataaaccttcatctccagtgatttgtattggtcctccttacttgtaaagcttagagtttaaaaatattaaaagaaaaaaaggggagaggctcccacagggacacagctagacaagatgagatgcagggaatctgatgttcttttttatgggaacagtcatatatgccatcccccattaccacctacccatgcccagactgcccccgctccattctgccaagacagatcaatgactataaaagctacaaaagggcctggagatctcatctagtttagttaccaaccaaccttttatgcacaagactttctaagctgggtgtggtggctcatgcctgtagtctcagccactcaaaaggctgaggtaggaggatggcttgagcccaagagttcgagtccagcctgggcaacatagagagacctcatctctaacacaattttttttttgaaacatgaaaaatgaagatttctgaccatgcttctctcattagttaacactttgggctgtgagggtctgatgcagagagacacagcctgggaggatcctaacatgtacacagcattcaaaaggctacaagacactttctgttgtgtccccttgaacaagcagtttgtaagattttgttggccaggcatggtggctcgctcctgtaatcccagcactttgggaggctgaggctgatggttcacctgaggtcaggagttcgagaccagcctgaccaatatggtgaaaccccgtctctactaaaaatacaaaaattagccgggcatgatggcgtgtgcctgtagtctcagctactccggaggctgagacaggagaattgcttgagcccaggaggcggagactgtggtgagctgagatcgtgtcactgcgttccagcctgggtaacagagcgagactcggtctaaaaaaaaaaaaaaaaaagaaatcaggttttgtctactaaacctgctgcacggttaccgttactagtactcacagggtttgttgcacatgcatcgttgctaatagtgctaactaatattaacagcccttgccctatgcctggccctgtcccagcccccctcccttgtataatttaacccttgcactgggggtagagattttcatatctactgatttcttacctttgctcatttatcatggagtgtcctttggttttctgtgtttgtatatacctttaccacttatagatttgaccagcactcaagaaccagtgttactcctgggagttaatacaatcccagccccatggcaaagaaactcatgtggttaggattctgtgtgcagcctggttagccacagggcacgtaaggctttttataatattgacatgagtgcagaagccccattcccgtgtaagccctgagggctcttgtttcataatctttttttggtcacatgcacacagctttattgagatataacccactcatttaaagcatacaaatcagtgggttttagtgtcctatattcacagagctgtgcagccatcatcacaaatgtggaagttttcatttccccaaaaagaaacccgtacccattggcagtcactcctcatcttcgcccccagcccttggccaccgtttatctacacatacttttgaaaggctagtgaaactttctcagaaaaataaatgcttgctcaaacatttgggctataatttcaggggcttcatgggtgcccccctgacatttatcaagaacaccaggttaaggaatttagctataatggaggcctctgtgtttcccagtctcctgggtatcagaggcccagagagggcaggtgccttaccctgggccacgcagtgaaccagtggcagcaccatactcacacatctcctttctgcggttccccagtgacagagttctcaggaagctttttcatttattttctgagaggagggtaggccatcttgtattgatctccaactatatgccagccacaattctaggtgcttatcataaaggttcatttaatcttcacaatagtcctgcagagtggacagagtccttcagagtgggcattataatcaccattttaaagatggagaagctgaaaaccagagaggttaagtaactcacccaagactgcacagcaaaaggctggggctttgaaactcagggccacagactccaaagactatgtcctccccactatgctagatttttttcctaacctgtgaataggagacaaaatagtccttttatttctcacagttgctttgcacactcagaatccatgatttcttctgcatgagggccattcagacctgtgcagaagagagtaatggaccaaggagtcttgggagcacctaggaggaggggatgggggagcatgaggaggagccagggaacagcagcagctgcagcaccagctcccaccccagcctctgccagtctcttggaggtggtgtgggtgcagacaccggctcacaaggtgccctgttagtgagcttggggtgccatgggagccttcttgttgtcaggcccaacccaagctggctgaagaacaccctgatggcctccatttgagcacaactaatgaaggactggatgccagagataagtccaggagggtgatgctgcagggcaggccagggaagagggtacttcatctctatcatggtcctctgcccatccatgccagcatctaacacctgttaaacactgggaggcaggtggtgaaggggccacttcccagcctctaagatacctcctaagccaggaggcattctgtgattaaattacagggcctcccacttactcctttatccttgaggcggtgctggaagcttaatgccaatctggtgtagggctctgggactacaggaccaaggcaagcagtcctttctctctctctctctctttttagctaaggaagccagcacatctgttctttgagaaaaagccctgtatttagaggtgtctgcctttgaaggcaacctgagaaactgtcatcttggcgctttggggactggccatttacacttctcataaatattcagaagtaggcagtcatttacataaagctaaatgcagaaggaattctcttttcagggaatacctggcagattcattaaaaaaattaaagaaaccaagagcataagaatgaaaagcgaattctcggaccccaggctggttttttctggcatgggtgcagtaactttgcctctttgctcagttatcacttttttccaatgacagtaaccataagccctgagagccagcaaatagaacaaaaggtgctgtcacaaacattgtgcaatctcatctctgagatttccatctggaaaatagactggagagagttaaggcttcaaccagccttgcagataaatgcagttagttaccagcccagcaaccctctgcttgcatgagagcccattatgctaacctccttttgaaattgctttgtttctcctccttccctgcactccactccccaagataatttggaaacctgggcaccaaggcttgtcccactctaggggactggggaaacagggattttgccagcacctcctggcagggcaaccatcaggtcaaagggacctgacccatgaccccttcctcagatcattgtgggtgtgattctcctctactacatactcggagtcagtgccttaattggagcagctgtcatcattctactggctcctgtccagtacttcgtggccaccaagctgtctcaggcccagcggagcacactggtgagtgcccaaaggtgtgtgtgttttgtccctcttcccctccttccctcgacagcagcaggtctcctcccacacacccacactgtcattgactttgactttgactttgagtaggccacttcacctgtccaggcctcagcttctttgtctgggaaatggagtcaatgggggaggaggctgcctcccggtgaggacaggaggcgggcatggcagtgacagtattgacactcaggccttcctctcgggtgggagacggagcagaagcctctcccctctgactcggggacccctgcaggagtattccaatgagcggctgaagcagaccaacgagatgctccgcggcatcaagctgctgaagctgtacgcctgggagaacatcttccgcacgcgggtggagacgacccgcaggaaggagatgaccagcctcagggcctttgccatctatacctccatctccagtgagttcaccccacacagccagccctgggtgctgctgcgtacatgcaaggagagggtgtcagagctcgggtaagagggggtgcagggacagaagcaggaggccttgagattatccgactcagtaggggagcctcaaactggctctgatagctaagctcccagaaatcaaagtactcttcattcatttatccaacaaacatgcatggaaagcctgctatgtgctggacactgtgctggccctcaggatacagtgatgaggaagagagatgaagtttcattcctcatggaactgatatgttattgacagacagcagcaagtaagtaaatgaccacagttttgaactctcctaagaatgaagactttttagtaagtcagactgagctgtcattgccctggggaagctacaagaaagcttccatccacttggggctatgcaaaagaaaaagactagttatccttaaatatcagaagcccaggctgaaggtactcacaggtgtagggactgaatttatattaaccaagtagtttgggaaccccaagccaaggaagaagaaaaagaccaaaactggtaaaagtcctagagtcccatatacttgaaaccattttactgagaatgtaaaacttttttttctttttttgagatggagtctcgctctgtcacccaggctggagtgcagtggcaaaatctcggctcactgcaacctccacatcccaggttcaagtgattctcctgcctcagcctcccatgtagctgggactacaggcacacaccaccacacccgactaatttttgtatttttagtagagacagagtttcaccatattggccaggctagtcttgaactcctgacctcgtgatccacccgcctcagcctcccaaagtgctggaattacatgcatgagccactgtgcccagcccaaaagattttttagaaattgaaattttagttatggaaattaattcagtgaacaatggtcccctggtcagagtgagggcttacggaggtcaggtgatccatggagtcctggcccaagtttatctcacagttggtctcgtggctccgtggacccatcccatggtggttacttcccaagtgcataattgggatgtagatatttagcaaccagctgacttcacactagttccctgacctgtccagtctaagagtcattatggccaagtggaagcccctggaaagaagaaaacaaaaaagaaaccaaaacttactcagtgcacaggttacatgaatgagtatagctgaagagagaatttttgaattagaagacagatgagtggggattacacagaacgtggcaaggagagtaagttggtagaaccattttacagatgggaaattaaggccagaggggagtgtgttcctgagatccctcctgaggttagtagcatggctcggactagatcctccaaagtctcttaactcctggtctcaggctattttccacaaagagctgggggcctctgtggggtgaagaagacttaggacaccatggggcaccattatgaggccatttcctcctaggagaaaaaaaatctctgggctctgaaaggagtagaattagggtaggaaattaagagaggctaccgaccacctcctccaactaaaattggttcttttggtgccaggaagagacacacctggtgggggagggaaggtggtaatggagggggtgctggtagtgtctcccagatagacccatccaacaagtctcatggagaatgagacggtcactcaggtcatctgcgtattcttggcattcttgctgcctagagagagagtctgatggagctaggtggccaccaagctgtcccactccccaagacagtttggaaacatgggcaccaaggcatgtccctgtctaggggactggggaaatatcccatagcagtgttctcacagtatggggctggccatgaataccccaggagtccaacctccctttgtccagctagaccatggtgtcctatgcctcaggcagggaatgtggtccagtcatcagtggctgggccgtctgccatacatggtgcaagccatggcgttttatgcagaaagtcctgctagcatttgattttctcagaatggagctgtgagcatggcaggcaaccactgtttcctggattcttcaccaagacaccccaagttcctggtctctccccgttatcctcatccctgaccctgtggttctcagagcctccaaacacactcaggctaagcactccatagacaggggaaatttggaaggaacatctagggagctcagaaaagccaatgtccctagccccaggcccacttcaaccttctctctgtcagtcctgcctgcccctggaggctggttacatgaagagtaaccccctgcttgtgtatagccccccagttttgtacaggtttagagacagttcccagcagtaggaacagctgccgaggtgggagagggcttctcccgatagccgggggacttcctctcccaggaacaacagggtggggtagagcaggcttgtcgttgctgagatagagagagggaagggaaacaacaaggaaagtgggggcactgggtccccaaggttcctggcacagcaagcagtgaagttggggcagcctcaggtcatgtagtgggggcaggtgacatctgctttgactgctcctaagagatatgtactcatctcctggattccaaactgcagcctgggacatgttttcttatataaacagcatcaaaagatgtgtgagttcccaggctagcccactgaaccctacctagtgggtgctcattgtcccccagagcccccagaagacaagccgtggctttgtgatgggcctggggccaggaggacctagggatatgttgtgaagagctgagaagactctggaaaaaaggggctctggagccaagcaggagcccgcccaggactcctcacgtgtccaagtcacctagggagagaaacagagcagcccaggttggtccctggaagagagcagcggaggaggggaaaggggagagcccctggggagagctttgaaagtcaagtgctgtttgctcagtgtgtttgcctttccgaggatgtgtttttttttccctccgttagtcagcagtgggagggggagagagacgggtggtagggtgcagggtacctcctggctgcaggcatatgctttgagtgcgtgttcatttacctcctctggacttcctgccttctgttaccagggatcaagacacaggtcattaggcgtgaggtaatggggcatctcttgttctgacccctggcgccagtcttggagtcctgacgctgcagaggagccccagagtcacatttcctgttggggcccatcctgctcatatgcggcaccatcagacttctgggcaggcaagattacctgtgactctgtctgatggtctcgccatcaatatcactgagagtagctgtgtatggagtcccgaactggtacaggataaaacagggggctgaaaagggaatgaatgggcacagtttctctggcatcaaaagtcacatccagaattgatatttcctgttgagtaaaaatagaaatataagttgctcagtggatgttgagtgagccctattcatgtgccccactctgtgccaagcaccaggaaggagggaagggaaaaatgataagatgttctccccgttctccaggagtttatgctccactaagaagtcagagctaacatgcacagaacagtgtggcagcgagagcagaaccgtgtggccagctccatgcttgccgcctagcaagcgtgattgcacttcatcctcataacaacttggtgaggtgtgttgctctgttgtcccattttacagcagagaggactgactctcagtgaattgaaatgtctcagtgaggtcttccacagcaaaaggcgaagcacagagaaggaagtccatgtgggctgggagttcacccagagattcatgtaggggcaatgtgggctgtaccttgcaagatggtgggatttcaatgaggagaagacaaagtgggaggaagctggagacaaggactgtggtctcttcctttagaagtcagttcaatctttttttccttgtggaagcagcataactctaggtggttcctctgtatctgaggacaagctttgtagaggtgacaaaggggtcctaggtcctatcaggcaagcactcgatatgctgccagttcattctgtccattgtgagatacccattccagagcgcttcctctgtgccaggctctacggaggttctggatgttaaagaggaagcaggcatggccctggccctcccagtcttgtgggagattgatcatgcccatgaatagtgaccatgtggtcagagccacagggtcaattccaaatgcccctgtttctcttttgtgttactcacctgactctgggtctttcgtttcttccattcattttttttaaacaaatatttcctgcccaccttctgtgtgccaggcctggggatgcagtgggagaagcctctgtcctcctcagtggaggcgctaactcagaacaggcagtggagaaaaacaacatgacctggagacctggtgccccttccttccccagcatctttgaaattcttttggttgttgttgttttgagatggagtctcactctgttgtcaggctggagtgcagtggcgcgatctcaactcactgcaacctctgcctcccaggttcaagtaattctccctgcctcagcctcccaagtagctgggattacaggtgctctctaccatgcccagtaatattttttgtatttttagtagagacagggtttcgccatgttggccagcctggtctcaaactcctgacctcaggtgatccacctgccttggcctcccaaaatgctgggattacaagcatgagccactgtgcctggcctgaaattcttcaatatctacctgcccttctgccagttggtgcagccacagtgggctgcttatgcatatcctggcctggcttggtggggagcatggctgagggagagccggggcacccatcaattaaggaggtaaagatcagtctgactgagatgcctcctgccacacttcctcagctgccagcaactgacaccattaacctgatttccttccccctctgttgactgcactgactattggactgaatgggaaacagccccgtgcacctcaaaatgcacttcccctcctgcagatgcatcttgcaattaggcccaaactgtgagcctgcatgctcctcccctggccctgcacaggcaacaaagctgaagttaatcagaggtacaaatggctggctatgcctctctgacacgtaacttctggaacatgtatcaatgctttggaaatgaaaagctcctggtattgcaatgccaggctggtgcccataagggccagaaaacattccttgggcaaagccagggggagtgggtgatctgatcccagctcaggtttgttgatttgttgttttgtttgtttcgttttgtatggggcaagggttgagggtatgaaaaacttacactatcatttactaccgtagtccccagaacccagcacaccagcacaaggcctggaacagggataccttttttgaatgaataagtctttttttttttttttttttttttttttgagacagagtttcactcttgttgcccaggctggagtgcagtggcgcgatctcggctcactgcaacctccgcctcctgggttcaagcgattctcctgcctcagcctctcgagtagctaggattacaggtatgcgccaccacgcctggctaatattttggtatttttagtagagatggggtttcaccatgttggccaggctggtctcaaactcctgacctcaggtgatccacccaccttggcctcccagagtgctgggattacaggcgtgagccactgtgcccagccttgaatggataagtcttaagggatatttttggaaaggatattctaaaaaatacccatgtctctacactattgcagaagggctttcagttttgatggcagcctttcaggccagcctacacgcaactaaacttttccataacagcatcacacttacacaagaagaaggttttataatccacttgccattatttaacatagttcttcctccttaactttcaagatctgagcactataatgttcttctttttgtttttgtttttttctaaatcaaattaaggtgagtcacctcaccttgggcctgagttggacagaaatctattcttggctatattccccacccctccaccaccttggaaccttatagaactttatgtggttcaggaaaatgagggcgaggcctcagatcttcaacccatgacagctgtatgcccagctccctgccttcctgtcttacccccagctagggcacaggactgactattgtgcccagagaggtgccagagcctgtaacaaccccagacttcccaggtccagccacatccaccccagagccccaaaagatgatcttcagagagacctttaaaacacaagtagctggtcacttccatccagaccagaacccaagatggctgtgctcttgctgagacatgttggttgtcattgcctccgagcccactttagccctcagctctgtaccagaaatgctgttcctttgggaatcacagccaaagaagagatggagcagttctggaataagaacacaagttcaaactgtcccatatctccccacatcactatctacagttggtctcttcccatggcgatgtccatctgccaccgtggcactggtattgctttgagtgcaggggtctctctttttggcatgttggccctgttactccctgggaactttgagtcttatttggaatgcgtgaagtccctgtgtccggggccagcactgatccacacagctaagtttgcactcatcttccctctcatgtatcatatctggaatggggtctgacacttgatgtgggacctaggaaaaggcctgaagattccccagctataccaatctggagtggttgtcccggttcttactgtactgtcctctgtagggctggcagccatgtgaagaacagaggttcccagcatcatcttcctacacattattacattcacccatctttctgtttctcacttttatctccagcctgggaaaagttctccttatttgtttaaatccttttgtgcttttagatccccttggagcagtagagtaccttgtagaccataagagtggaaaagggtctagttttctccttgtttctaaagatggggtggctgaaaaaactccccttttttgcctacagcttgcctctctgggcctagaagtggttattctgtctccatattggcctttgatttgtgctgagggtcagcttttggctccttcttcctgagacagtggaaacaatgccagctgtgtggcttctgccctgggggctgggggtgaggctttgggtgccactgcctgtgggttgctggcttaaaggacaattctgttcattggtgagagcccaggccattaacacctacgcagtgttattgaaagaagagaggcgggggtggaggggaattagtctatcccagctagagggagataaagagggctagttagttcttggagcagctgctttgaggagaaaatgtatagcttttgacacaacaggaagatccagaaaattatcattgaacatattaaaggttatttctttttcttgcaaaacacacacacacacacacacacacacacacacacgcgaacacacgcagctgatgattctactctcccagccccagccctgaaggggacccagaactccctgcacaaaggctgtccttcaaggggagggtgaaagaagtggaaaatcacattttcattctttagcgtctccatacaacagccagaactgggcagaagctaattatatcagaagcatactccatgttgctgcatcagctttgggatgttcatttttaaatttatttatagcttgtctcattcctcaaaggagttcagggagctacaaaaataaagacaataaaattgaaaaaaattaaattaaaaaaaccatgaccagggaaaatgtgcagtagaatgaagtgtcaattatcacgttttctgactgcaaaatctcccccacggctgatgcaccatcatttactacaacagcccctcttgttggacatttccagtttatttcgtttgggatggtttgttgctgttgctgtggttgtggttttgttttattgaattttgtgttagctgcagctaataccatcttgctgatggctttgcgctgctcttgaatgattactcaggataaatttcctggagacggattataggatcagaaggtctgaacttctgtgtggctctagctacaaagcaccagattgctttccaagagcgttgtagcaatttataatccaacactcagcctattttttggctgggagtcaagccccagaatgtgaaggaggggtcttggcctggagcaggggctgagggatgggtgcacaggacccctccttattggttatttatggggatgggccaggaggagcagaatagaggcccctgccctcccagttgctccttggagtgactgaccccataggggaggggcgaggctacctcacatttagaactatgtagttggtgatggtcaaggtcctaggtctgatgggcatcctcctccctctcctcctcagccagtaatggctgcactatgtcgtatgtcctagatctgggtcccttttgctgtgggaacaccaataatacttacgctgtttcctgccggaaacggtgcaggagggctgtggcatggtagtgggccctggaaaccatctagccttcatgaggaagggcagttaaagcacaggcatgtatgatgttggtattgattaaaagcctcacgggcagagaaattcgccatctgccagggccccagccatacgagggctccagccatacatcctccaggagactgggacctctccaattgcaggagccttgccttccccatcagattaggaattccccgaggatggggacaatgtccttcccacctgcttgagaactcctaaggggcatgtactctgtctccccattgtatctggaacttcctgggagcatagctcctgtctccgtcctcagactgggaatcccctaagggcagaggccatgtccttccacccacttgggattccctgaagttggggaccacatctctgatgtacaatgctttgtatgtactgactgctgcaggattcttggagtaaatgggcagtcaacttcttggactggtattgaccatctggacttcatcagagtgtccaagactttgccattcattagacaggggccatgtgcacaggcagagccctggcctctggcttctggctcctgactcctggtccctctgctttaatttggctaatggcagaaccagactcctttctgggctgccctggaaggggatccttgaatgaaagaggatagatgggaaggtggcagctgacatggttacctcttatgccatgggggggctgctctctctggaaatttaggcctggggtcagggcactgttgagcattttacaccctaggccagaggaggggtgacctgtggagcagggctaagctagtagcccatgaggtatgatgtgtaggcagcacctggggctcacagagcctgttacccatgttatctcctctgaccttggaaagagctggggtgtatgaacaagtatttataagtttacaaaaatcatatgaggaaactgaggcacggggaaggtaaatgacatgccctaggttacacagcttataagtagcagggattctgcccttctgtcacaccaagtcccactgtcttttcttcctggagtccctgtgactgatctaaaggccacatgtttaacagaataaggaggaggcctctgttgcagcaaaccagctaccccacccgcacacagactctaagggacatcctgctttaagctgtccttagttactaatacctcagtgagaatgagtttgaaattttctcaagagccatgggagactaggaagtctctaagcttcatagagagcctggcttggggggacacaggagccaaaggcagaggaagaagtggcagctttgtgcccccagaaacacgtgctcctgacctcacagttggccacagccagccaactctcccatccttctcccaccactttcccgtggggctaacttcaccctgtccacacggagtgacttaacagtttaagccccagagtcgggggccggggtacctgggacaagagtcctgagggaaatggggtgaggaactggaagtgccacagggctagagttctgcccctagcctactggagctgtgccccacaggctggccccactggactgcgctgcctccaagccatcctgggcatctccatgtgtagctgtcacgctcctcccactaaacgcctccctgtgcttcctctgcagttttcatgaacacggccatccccattgcagctgtcctcatagtaagtggatcctttctccatctcttgggggtagggtggagggggagggcgtctgcagtgacaggctgcccagatttggcctttctgcacaggggcctcagaagacaggctccacagccagactgaaaataggatcgaaagtttatagagggtgtggcccctccccaactccagccgaacaggggcctctgcctccaggcctggaagaccggaggcttagtatttagagaaattaaactttcttttaaaaaatagctatccaaatttttaatttttaaagtgaaacatgtgtattgtagaagtgatgggaaatccagaacagaaagctcaaagagaattaaaatcacccataatcccactggtaacatttttaatgtgtttctttccagtctttttttaaggcctatgatatgtcattttctacaaaaataggaatgtgctatgcatgcagttttgcaacctgctcttttaaatttaggaatatgccacacacaattctccatgccactgaatattatgatggtggctttctaaagcaattttgataaaagctgtgtgtgagctgagccatgggggtcaagcagcatgctcctacagaaaggcctgggcccctacgagcctgcagccccctcacccagcctcccatccccatcttctgtgatggctgcagttccttaaaaagatctgcttatttcccccggggccagtgtccctgagctgtgtagagttcacagcctgtcggatacacttgggaattcacttccaatgtgatgtattgagctggttcctggcctggctcctgggggaactgtgggtaacagaggccactgagccagccaggtggctggggcaaagcactgtgcagtttcgtaatcactctgtttacgttatcccgatgaggactggggagatgagcaccccgcctgctgtctgcagagggggccgtgctgacctaacccgagatctcctccctgcttattcccagccaagactgggcaggacagggagtcttggccaggacagggagggagcagcccctgctctccagcttgaagtcctgaacttgttggggacgtttccatgagatgactgtggggatgatgaaggtgtctccaactaaaagatcctcttaggagcctgctccctgacagccctctcatttcccttccagtgctgagcgtttccagtgtgggagggacccacaccctgggccaccctggcctcacttgtgcctctgtccacagactttcgtgggccacgtcagcttcttcaaagaggccgacttctcgccctccgtggcctttgcctccctctccctcttccatatcttggtcacaccgctgttcctgctgtccagtgtggtccgatctaccgtcaaagctctagtgaggtgaggggagggtccgggcgagggcactgggcaggcaggtcctgtgtcagcctcaaggcttgctcgagtgatggccaaaccacagctgtttggtcccggaacacacccccattgctgggccttgctgtagctggtcctggttggtcagagggacattggcctgtatggtttcccagctcgccatccctgagcaaggacttgcttacatacctcccaggagaggggactcactgtcactttcacgacaacttaaaaaaaaaaaaaaaccagtgttgagccaaatgtggaatcctcctaaattctacccactggtcctaacttcaccctccagagccaccaagaatgaggccatcccgtccccacgtggctgccccatggatatcagaaggcatccactgtgtctatctttcccaggccaagtatcccctaccctttccacagcccctgagccctcacagcctcagccagtgaaacagcttcccccaagcgctgggtcctgctctgattggcccacagctcttggaggctcccacttccaggctctagagcctcatggggactctgccactgtcccagaggcattgccctcttgggaatgaaagcctgaaggtagaaggctgaggctttggctgggaaatgccctgtctggagtgagaagatgtccttgggcctctgaagtagctctgcctccttgaaagcaagagcctgtcatgcctctatggagggctggcttgtccttacccatggccagagaaccagtcagtaacaaatgtcctctgtgtcttcagccttgaggaaggtgacacccctgtctcatgggaccctggcaggtactgggaagctggaaggaaggagtagctgttggaatgaagtagctgatagagagggtagcttgcagggggagactctagcatgggttcaaagatggaatggggcataactcagcaaaattatgctctaaggagtatctgaccaggcagtagctggttaaacagggattagctcccatttccacagtcggctgtgctgactcagtttcttgaccagggtgttgtggggtctgaagatcacccctcctcccaccacccactctccagccctatgattctgtgtagaaaccacagatttaagaacgctgcacctgcctgaaaactgttgcactgatcccaaagcgttcatattttcaaacactctggatcccactgtttccaggaatggaacaccagagtagcagaggccttttcagtgaggcagctcaggctctggctgaaggtgggcgcaggacactacctgaagcttcaccccaagagatgagggccagctccactcttcccagtcaccgcctgtgggggagggaggctggacagggcatgaaggcagagcctggtggtctgcccctcccatctaggggtggcgcacagaaagggagactccaggccacagctcacttacaccccagaataaccttgccttgagggtgggatggcttgtctgccccaggcctgttggacatttagcaaaagagaagaaaggggaatacaaacaatcctgagcttcccagaaagctttcacacctccaggatgggagagaatgaactagaagagtgaagcttccagtgcttcctcaggtccacagggaaatctggacaggggagagggtaggaatagccgcctcccccgtgagtaatgacacctcctccagcaggctgttatggggatccgattacataatgctacaaaacagttaacacagtgtctggcatttagtgtatgctcacaaaatactagctattgattctttaccaatcctagtcctaactaaccttaaccctgaccaatccaacaccaaccatccttcagtctaataacccagactaactaacttcaacattaaccctaaaactaaccaatctcacctccaatccagaccccagcctattccagctgactggtcaaccctagcaaaccctggtaacaccaattacctgcccccatgcccactggtctgcccccttcagtgtgggctttgtgggactatacttcaggcctgagatcctgctcagagctctctatcaggctgcgccctctcccctcccctctgcccctggcaggggtgaggggtgtctctgtgcttcccgagcagcgtgcaaaagctaagcgagttcctgtccagtgcagagatccgtgaggagcagtgtgccccccatgagcccacacctcagggcccagccagcaagtaccaggcggtggtgagtgcccggcctccccttgctactcccagcatggtcctctaaggcccaaaacttgggcctgctgtgtcggacttctgccttttttcccaggaagaggggctcccttccctacacagctcccagcccagtgggtcctcacctccaaaccacccccagcccctcagggttgtgaaccgcaagcgtccagcccgggaggattgtcggggcctcaccggcccactgcagagcctggtccccagtgcagatggcgatgctgacaactgctgtgtccaggtgagtcctgctgccccatgcctggccacccagcaccaactcccagagggagctcagcacctggaaagccagaaagctgcatgcttagtcctctgcagaggtcaccctgcctgcctgtacggtccataggagtccagaaaccagggaccaccaagtggggggacccccagccttaggcaagggtcagcatgagaaggccagtctcccactcccctgctctggaagtgatccaggggctggaatcagtgtcttttggctttcatggaggaggggaagccagagactattcactgggaactggctgcctttctgttctctcctgggcggtgggacacgcctaatgaagatcatgggaggctacttcacgtggaccccagatggaatccccacactgtccaacatcaccattcgtatcccccgaggtatggcccagtccacccctccagcatgcccctccccatgtcccactgaataacatagagataaaaagacaaagctgcatttattgagcacctactctctgctcattcttggtgtatgccctgggtatattatagaaggggaaggctacattctagaggcttccgtgtgctgggtgggagtgaagcactaaggacagggtaaaattgccagccttaatgtcaaaccatccattgcagacagtataggtaatgcacaaaaagatcagaagtgggtagccaaggaacgcaagtggaagtgatggggtttctgagaatggacaaaggccctgaggccatgaggcaggaggattttctggcagaggcagccatgagcaaagtatggaggtgggttggaggtgggacccaggatggtgtttcttgggaccacaaggagcctgggctcatactaggagcatgggaaaggagaagcgagtgcttaggaagggtggcggggcaggaaatcagagagggggaaggacctggggagccagaggaggatgttgatttccagaaggaaaggattaaagagggagaggacttgctggggattctaggtaggaagaaagaaaacaggggccccagggttgggtgcatctgtctgtctgtctttctgggtaatggttgttcagactcccccggccccactcacatctgccaccctccctccctgcaggccagctgactatgatcgtggggcaggtgggctgcggcaagtcctcgctccttctagccgcactgggggagatgcagaaggtctcaggggctgtcttctggagcaggtaatacatgtatcctcagggcccagtggaggggaaatctccttttaaccatcctcctcagttgaggatgcacacacatttattggagggcccactctgtgttcagtgaggactcaataaatgctgctaatggatattctcatcatcatcactagtacgtattcacctcttactatgcgcaggttctttgctaagtcctttgcatgcattatttcatttaatttttatgataactaacaaggtccatactgttctcaattctcatttatagaggaaggttaaactatttgtcctaattcacacagctaataagtggcagagctggaattgaaactcagttctgtcagactctgaatcccatggttactcagatgcacggcagtaatttcccagtgtgggaaattgcaacaccaacattggtttccagcttggtcctgagctgcactgacctacacaccataagtgggtgttctgaagatccagatgtaaccaataaatgttggtttctgggcaaagatcactgtcttaattaaagagccagaaccccaggctcagtcaatcacgaatctgttatttatacccacctacttccaagaagcacttgaaactagttgatgaaagattcatgtaaaaatcaaaaccacaatgagataccatctcacacccgttagaatggtgatcgttaaaaagtcaggaaacaacaaatgctggagaggatgtggagaaataggaacgcttttacactgttggtgggagtgtaaattagttcaaccattgtggaagacagtgcggtgattcctcaaggatctagaaccagaaataccatttgacccagcaattccattactgggtatatacccaaaggattataaatcattctactataaagacacatgcagacgtatgtttattgcagcactattcacaatagcaaagacttggaaacaacccaaatgcccatcaatgatagactggataaagaaaatgtggcacatatacaccatggaatactatgcagacataaaaaaggttgagttcgtgtcctttgcagggacatggatgaagctggaaactatcattctcagcaaactcacacaggaacagaaaagcaaataccacatgttctcactcataagtgggagttgaacaatgagaacacatggacacagggaggggaacatcacacactggggcctgtctgggggtggggggcaaggggagggatagcattaggagaaatacttaatgtagatgaagggttgatgggtgcagcaaaccaccatggcatgtgtatacctatgtaacaaacctgcacgttctgcacgtatatcccagaacttgaagtataataaaaaaagatgcatgtaaaataaaaccctttaaaaaggtaagaaaataggaactgagaaatgaagagggtaaaaagatgttcagcaacctgggcagaggacaactacagccatcaacataaaacctggctctgtgccctctggtagccaagggaaaaagggatctctgggctttggagtattcatttaggaataaaagttgcagccaatcagcagaagggcaagctttccctaccaatcatttctaggggaaaattattgaaggtgtcaggtttttcataagcatgagtacagaactgagcagggagaaagactttgggcccaatgtctgaatatcaacatgcacccccgtttcctgcatttccaagatgtccctgaatggtgtatccaaaagatggcaaatttccctcctcagtggggtcgtgggctagcagatgagccccttgggtttcccatcacctcccatcagggactgtgatgtctttgggggcagaggggtctttgcctccattcgccattttatttgggagatttttcaacatagcctgactgggaaggcccaggtattcggtttgagatcatattgccttattccgactgcctctccagcctttggagggaggagcccttttctgctgtccaactgcatgcctgcagcaagaagacaagagtccccagtgcactgtgagctgaagaaagtaaccaatatttattgggtacctcctatgggccatgccctttgctaagtgcattgtcaacatgatctcatcaagcctcctactaagtttaggaggggagtgttgttaccccatttcacagaagcagaaactcaggctcagagaagttgggtgacttactagtcagtgtgtggagcagagactctgcccatgttctttccctcaaacctggtcactgctggggcccccagggcctagtcctaagggttattgtccaagccccatgtagtggtcaggctggatctgggctctcctccaaggcagggcttttccagaaggattgcagggctcagacactggagctgcccctgccttgacctgctcagcatggatgtcaaaacccactctgaacctggtccctttgccctgctttcttctcctcccccaccctcatgccctcatgtggcatcgtgcctgcctcaggagctctccttgtcctatgtagatgaagcaggcatgattggcaggggtctgctctgccctgcctcagtccccacctcttctccaagctgtgccaaccctccgggtctgactgctgcccctctctcttaggaaacctctgccccagcccagggaacacaaggagcctctccaaggcagaggaccctaagcacttcttttttttattattttttattttattttaggttctgagatacatgtgcagagtgtgcaggtttgttacatagctatacatgtgccatggtgctttgctgcacctatcaacctgtcatctttttaagccccacatgtattaggtatttgtcctaatgctctccctcctcttgcctcccaccccccgacaggctcggtatgtgatgttcccctccctgtgtccacgtgttctcattgttcaactcccacttatagtgagcacatgtggtggttggttttctgttcctgcctaagcacttattataggccaggcactgtgcaggcacctcatcatctcagtcagtctgcaccgaactctgtgcagtagatattattatatcctcatttatcagattaggaaactgaggtgaagcaagttgtccaaggccacccagctgttaaatggcagaagtgggatttgcacctaggtgctcaagtgcattggtttgccaccatgtgctcaaagagaaggggcacaagagcctcatgaagaaggcatagctagcctgacagtccaaaggccagcagccgctgtggccatgactcacacacacctgcctcctcccagaactgccacgtgggtcctcacagctctgtccttatcaacacttactctcctttacaggtagcctaggccccagctcccagctctgttcgaggctcgcagaggggcggtagtgaaggggtctcatttctccaggatcctctttgctctctcgcccggtcctggtccagcttccctttcaagcatagtgaagtgcatttgttagcttgcagccaaccctgggaaatcatgagaatttgttcccaagtcaactcattctccagcgtccacagtgacgtattcactcacccagttgagcgcctagtgtatactagaccctgtgacagcaacaggagtgcaaaggtgactaagacgtggcccctgctttttttttttttttttttttttgagacggagtctcgccctgttgcccaggctggagtgcagtggtgcgatctcagctcctcacaagctctgcctcctaggttcaagcgattctcctgcttcagcctcccaagtagctgggactacaggtgtacaccaccatgccggctaattttttgtatttttagtagagacggggtttcactatgttggccagggtaatctcgaactcctgacctcatgatccgcccgcctcagcctcccaaagtgctgggattacaggcatgagccaccacccctggccggccccgcttttaagagaggggagagaagacctgggccttagaagagctcagaggaaccacaattgactctgcagtcaaggagaggaggctcactgcggatgtggtatttgagccttgaaggatgagtgtggtttcatcaagtagaaaaggcagggatgggaaagggaggtggtccaggcaggggtgatggtgtgggcaaagccttgctgatattaaagaacatagttctgtgcacctggaacactggatgcatggggtgcattatgaaagatgggactgaagaagtgaacttggcttagatcccatgtagtaggtctgagaagtaagatttaacccaaaggttgcaaaagaaccatgcttgtgataaaggatgatggattggggaaacagagaaaaagacagacagactgtaggaagggaggtattagcaaataatcataacacagtgtgaggtgtgcattaatattcactcattccaagtattgatcaagaagagaggtaggtactgggttaggaaacagcttgggcaaatgcatggggaaatgagagatgtcaagatgcattctaatggcagcctcttgaagatcttaagttgtttttggttcactcatttcgcaaatgaattcatttagcaaaagcactatggatacagtgcttacctctaggaagtaagttttagcccaaatgctgcagaaggatcatgcttatgacaaaggatgatggactggggagagagaaaaagaaaagacagacagactccaggaaggaaggtcagtctgcagctccttatagtggctaggagaaggagtctaggcagatacgactcaattagcttcatctgctgtttgtctctcaaaatctagacatgtgcactgctctggctggcccacctatcctgggcattgagttaagtgtgggggctgtgtgttgagagtccccctccattactggcaggaactccacacctcagacattgagccccaggtctgcagggagaagacgtgcttgcaaagtgagctaaaagcaaaacagcctctgacctggcaagcattcccaagtctgcacgcctgcagccagaggagagggtgatgccaggctgctgctcagatgcttttcagccatacccaggccaagacctggtgaccaggcagccagaaggagttccaggaggcacaaggcaggaagttgggggattaggaggtgtagaatggagaatgctctggggagatgggtgctttgttggtgcaactattcgtttattcctccagtgaccacgtgagcagtatggctgcacacacaggctctgcagccaagctgcctgggttcacatttggtctctgtgctttggaaaatttcataagctttctctaccagtttcccttattacccatgagattgatgtgaggattaacctagcatgtagtaaatatcctataaatattattattcaatagtgtacttctttgccaggaacaaaattcacctgttcctctttaaatgtcctccagtctgtctcctgggaaagattcttgtgagctccctggggacagggaccatattttgtttgtctcactgtatccgtagtgctttttgctaaacgaattcacttgctaaatgaatgaaccaggaacaacttaagaccttcaagaggctgccattataatgcatcttgacatctctctcctttccacatgcctttgtccgagctgtttcctaacccagtatttcactacccctcttctccatcaatatttggaatgagcaaataccgttagtgcatacctcacatggtattataattatttgctaatgcgtctgtctcctccatgactctgagctccttgagggattattccatgttgtaccccaggtgccccatgcagatgtgtattttgtgcactgttctgtgtaggctacaaaggaaaaggcctagcacctgcccttggggagctcacccacccaggatggacagaggtgtgcagacagagctgcagggtgggcacaaagggtccatctgctgaagtcctgcagatgcagccccgagcttgtccctcacgtcagcagcctggctcctggtctcagagagaactgtgtggttcccaagcattcactttaggaagaatcacttgcccctccctggctctctgcttcaaggaactgtgacaaccttgggatttgcaaactctctctttaatccttaagaggaaaatgttttggtaaaaagtcaagattagcagatacactcgggtgaaattctttccctggaaataaagaatagagccattaatatccacagtagagtgactttaaatgcccccggggggtcagcaggaaccagggccctgaggaaaggatcagcgtggggaagaggctcccacttccctgtgaggagctgcacatgcagtctcactggagctccctgctgcaatgctgttgcctgtggtggttggtgtggatgctgcctgccaagagccctgattccccaggaagagagaaaaaggcttctctcaggacggccctggtcgcatctgcctgtacaattcctggagcctttggggagctgaagtcaggggctcaagtgcccctgggtttcctggaggaggcaggtgtggtgagacagctgacagacaggagaagggatgctctgaggaagtgactgtccagccatgggaaccagatggcccctggctgtagtcctgatgctgccacttgctagctctgtgaccttgagcaggttacttcacctctctgagacagactcactgtctggacaatgagtaaaaccctacctttcctgtctcagagatttggcaatgggacccaatgacatcaattggaaaggatgctgtgggtgaaaggtaacctttcaggacagcgacaagcctgtctgggcaggatgaatgggctgtggagccctgtatatcctagctcactctttgaacctcagtttccacttcttccctttttatttattgccggggtcttaaatgagtgttgggggtatctgattctccctctgcctgtacttttggggccaagcactgagctgaaaagacaattcctcctagttctccaagcctacaacctgccccctaaccagctgtgagctgtaatacattctccagtgtcactgtgaggtttgtgccttcacccccattttatagatcaggaaacagaggctcctccaagtaaaggagcttgcctcagatttcacagccaatgagtggaaaagcctctgggattcaaatgtcagagcccatatttttcctacttctcgcacctgttatcatatgctgcctcttcctttaacctgcagttccctcccttcacctccaccgtctcaatccttcccactctttaaggttcagttcagctatgacttcttctatgaggctctactcattttctcagatttcttcctcctccaaatttcttgtaaaaattatgttttttctctgattctaaaagaatgcacattacattagaaaagatacacaagcatacagaagataaaaaccacctaatatcccatcacccagaagcttccagtttttctttatgcatttgcatatgcatttgtgtttacttttccccaaaagttctccgatactttgtcctacttttcttttgacccttataacttcctgacttcggtacctttctgatttgccctaccagagtgtgagcccctggaaggcagcctctgcaccctgattcaggttgccacacatatgccagctcctagtgggctggagggaaggacatgcggttggggaactggaagactcatgctttcagctgtgtgcttcctccctagagtgcaggcagaggaggaatcgaatcccctcagcactcttgtaaagaccacagcaatgagtgagagatggtgcctgccagacataccattctttacttttcagcttaaaacagatacaaagtttggggaggctcactggaggaggcttggggctacactggaaagagaagaacttggattcacaccccagcttcccctcttcccagctctgtcacatttgcaaactctgagtctcagtatcctcatgtgtaaaatggggatagggtttatagggttgtaaggatgagatgatgagttgtttgcaaacaacttctcacagtgcacagtgaaggtcagcaatgagagccagccccgccctttcttctttccaaatgattaatatatctgttaccagcctccattcattatatagctctgtcatgtgctaagcaccatgggggctgaaaaagatgttcttcctgccttaaaattccactggggatgaacaaattacacgggagctgatcagagaggaaggcagtccattatgagggctaattgagcagtgcagaccatgttgcaaactgagttagggcctggagagcttactgtgtgctggggtcctcaggaatgccacagatgcatcaataaccacctctgctactctggaagtagtcacatcaggaagactccagagataagcttatctgggctgtggccacagagctggaatttgtaagctttaggtttctatgtctcatgttaccagcttgtctataaattgtaaattacagccatctgatggttagggaatatgaagtttggttaagagaatgaaatgagaccacgaagattagagaacaggaaaagaggggactggggactacatacccatcagaatcttcattcagtcctgaccctcagcaggagggggatttcatcaggctcatttccatccttgatttcgtccatcctggttctcctgacaaggggcatttatcagagttatggcatgggaaatcacaggggagtaatgtaccatggcatttaagagtatgaacgttggagtcggagctattttctccgctacttactagctgtgtgactttgggcaagttacttagcctttctctgagcctcactttctttatctgtaaagtgagggcgatcagaataaacctccttcatatggttattttgagctttataaagagacaatactggctgagcacggtggctcactgccagtaatcccagcactttaggaggccaaagctggaggatcgcttgagcccaggagttggagaccagcctgggcaacatagggaatgagactcctgtctctacaaaaaatatacaaaaattagtcaggcatggtggtacgtgcctgtaatcccatctactcaggaggctaaggcaggaggatcgcttgagcccaggaggtggaggttgcagtgagccaagatcacgccattgtactccagcctgggcaacaggagtgaaaccctgtctgagagagagagagagagagaaaatactactatggtgcttataaaagttcaataaattttagctgttgttagtattattaaagtaagatctgtatgaaaataaagcagattttttcccccaaatgttcatgtcagaagtatatatttcattggcaaggggctgcttctggaaggttgagaggtatcctgggggaggggatagagcactggcaaaattggcatcacaattcaagtcacctcactcagtgttttttaagttatcaaaatccacagtatgaaaagcatttgacattacagtccactatatttatgcatttataaacaagagaaaaaatcacgaaaaatacagtaccacgtgcagtacacactgattccatctattctttttttttctttttcctcaaatgcacttgccgcctacttattccagacccaatgattgggtccctatccacagtttggaaaacactataagaaatgattgtgtcctctcactttccctctctgggatttagttttccaactataaaatgctcctgatgcccagccagcctcaccgctgctccgagtcaatgccaggaacgctgatttagcacatgctatttggagggtacccatccaggtgctgtgggagggacagagattgagaagagtgctttctgaccccacagaggccatttggaaaccctgggaatgggtgggagggttggaggtggggattgcttctcccctaagactcagcgtgatggaaaggcaatggggtgggaactaactggtgttggtctgtcccatttgtgtcccagcagccttcctgacagcgagataggagaggaccccaggtacagccttgggactgggtcagaagtgggtctcaacaaagggaaggggtagggtgggggtggaggacttgtgggtgggtaatgctgagtatggattcagggatgtgcagcctacatattttcagagacatggggctaaggcctgcattctcaatgagggcaaaatttggttcttggggacagaaaacacttagacattgcaatgctttgtggctgtccaaagtaccaaacagatgccagtatatctgtggtgctgaaatttcatggtgaatggagtcagaaaatagactagcgattgccagggtctggtgggagagagagggaagggactgccaatgtgtatgggatttgttttggggaagataaaaatgttttggaattagatagtggagatagttgcacaacctggtgaacgtacttttagtttcagaggttttctaaacctctgatttttttttaagtgacaggaaagacagaaaaaagtatatctaaaaaggctctaggggtgatcatggaaaagaaagttaagaaatatgactgtaaggaaaggagatgggtgtccctcaggccaggcagaaaattcagtcttgttgctttatgttcatgtgcaaatctaaaaaatccaagtgatatagattaatgaggctctgagtccctcaaaaccttccctccccttacctctccaaaaaacacttgagataccctagaggtggtatgaagtcaggatgggaaggttggctcagctttgcaaataagtttaagcctctggcctttgctctccaacaccaaagaggcttcactttggtatattttctctgccctttctccctccttgtccccaactgtcagtatgtgatgacaggctcagcctctgtaatggtagtgatcatatttcttgagccaaaaatcagacctcatggcatgtgacaagtttgcatatgtggatgagaacagagtggcagaatatttgacacgggagcagcttgggcagtccagggcacatggcactgcacctgacatccctggcagatcccccacattccgtggttgtcttctgatggggccatatggggctgcagatcatgcctggagccctcgcagctccagggctgcgggttcccagccccagagtgcaggtgctggtgtcagcctgcctggcctggcctggctctgtccagagcactccttgccccagctgtttgtgcagctgtatcagcctcagacctcagcctattcattccaacctgaatgcagaggctgggtctggaggagccacattgcgggcttcatactcctgatctgacaagttttccccccagagcctgcaccaatggcacctctccccattctccctcttaactgggtcctccagggccctcctcacacacccacgtggtcaggcagcagaggcttccccaagatgggcacaccccactctccacacctctctatgcagcatttgtggctacagactgggtccaggggattgtaaaggcatgctcatgttgggttggagggagctcaggatcttcctggaggatatggttcactcccatgagagctcagtatgcctttcctcccctgctgcagcccagagcgggagacagcgaccgacttggatatcaggtactgcgtcctgggaacattgccccccagggtcaactccctccagggtgctctcaggcccaagggagccacatcaccctgctgggcagcccccagaccccagccccagtgttgggggaggccagggagggcccctgtgctccaccaggtggctcgggagctgctgctgtttctgtgcatccatttactcccttcacataagatcatttttatctgggatctctttttcttttttcttcaaaaaccacatcactcaaaatgtggcttccttggctctgcttttaaaaaaaaaaaaaaaagttcttccatttggagaattacctgctgacttcaaagtccagtggcttgagggctacccaaagagggaggaagccagaagttgagtgttcccttggtttggtcacacttttgggctcctccctgactaaggaacaacagactgcagggctggggcaggctgggtgtagggcagggaggggatgaggtcctgctgccccagtcagttgagacccagacctctcaaacctgcctgggggaaggcaaggccaccagaggccacactaagcagatttctaccaactgcacctccccatccccttgcctccatctgagccatcagcttgacaactgcctctgagaacaagcccctgagaatgccttccgcaccccctactcccgccctgctttttccaggaagagaggccccgtggcctatgcttcgcagaaaccatggctgctaaatgccactgtggaggagaacatcatctttgagagtcccttcaacaaacaacggtaaaagcctgtcggagggaggcaggatgtggaggggaggaactgtctctggccagcctgccccagttccgggcccctccatcgatcacccacacccagccatctcactccccaggtgcttacctgcactccagcctctccatatggtgcacctggagaggggccaggtgtgcctgagcattggggcaatccagctcccataggggagagggcaggaatggagggaagggagagagccccgctgccttttctctagctggtgggagggctagctagctctctctgtgagtctccattcgcctggctcctgcactattttccctccaatgataatagttagggctagcatcgactgcgctcttactacataccaggcacagtgccgagctctttgtacacggaatttcctctcatgcttacaacaacctcagtaggtagatattattgttattcccactctacagatgaagaaccaagtttcagaaaggtcccaaggccacccagccagtaagtgaccaagatgggtctcaaatccaaagctgcctaacacctaagtacatgtttgtcaccaacatactctgatgcctccatgaactctggctggcacctgcccaggctaagggctggctggggaagtatgagaggaacaggctgggcaaatatttgaccagccatcatcattactgcctaaaccaaccagcagtggttttccctgcagtgccccaagcacgggttccggctgcagcttttcccactgcacagagatcatgagcgccctttcatcacttactctgcatatttgttcccaaccaattccatccttctagtatttaacctgcccaaacgctgtgtgaagtgctgacctcagctcttttcaagctcacacggtgtttgcttgcacccaagcgggaggcctattaaagccattgctcaccctgggcatagctacccagagactaatgaccctctgcaagtgctcgggccaactctgaccaggctgaccagctgcatcccctgcctctacccacgccaggtacaagatggtcattgaagcctgctctctgcagccagacatcgacatcctgccccatggagaccagacccagattggggaacgggttagtagcagcctctgaggggttttttcaaagccaggacccccaacctaccatgccctgagacactactcaggacaatgggtaactaggaaataggagacattgaaggctgaagagttgcctgcagtaaggtcaaacatgttgttcttgatgatgtcctttgacaggttttcagtcctgcttggagggcaaggtcagcttagtgccctcccaggctggggatcttcttcatttgcaccccaggtatacactgagagcccacacagcactgtgctcagcctggggttgtattgttcctgttcatcctccagatggggtcccctccacaagcttagacgaacaggattctcctgtgactgtcctccttttgtgtgattttaatccctgctgcctctgtctttgtttgtactggtcagatggtccctagcgcctacacaatgaatctttaaagacttggggctcatgctgccctcttctgaatgaattcagtaaacacgtgcaagttccttctctatgcaaggtgagaagcaggcaaagaagtggatagagccaggcctccatcccaaagagctcatagtccagtagggtacaggacagtgtctcctgaatggctgagggcatgatgtgttcctcctctttggtgacagggcatcaacctgtctggtggtcaacgccagcgaatcagtgtggcccgagccctctaccagcacgccaacgttgtcttcttggtgagtgcaagttcccttggggtcctggtctctggctgcctcccaggcctaactgcccacctccacctccccgcaaccccaccatcatccaacaatctccctctccaggagtaaatccctcctgccagagatattgccttatcatcctagtgatagggaaactgaggcaggcaaggatagcacaaatgacccattgcagacttcagatggagctctgcagtagccaatgaggagaggcaagctgtagttataggctgcctgtctgtgggacagcccaacccctcaacacttatgcagcccgactataagaatggctgataacagaatgtgtgctgccacttcccatcttatgcccagtgcagacattgctaattgttcacagcattatttcccatggaacttaactcatcctcagaatccttctcaacacagcactccaggtaaccactagccatcaaacatgagataaaactaggccaggcgcggtggctcacgcctgttattccagcactttgggaggccgaggcaggcggatcacgaggtcgggagatcgagaccatcctggccaacacggtgaaaccccgtctctactaaaaatacaaaaaattagctgggtgcggtggcgggcgcctgtagtcccagctactccggaggctgaggcaggagaatggcgtgaacccgggaggcggagcttgcagcgagccgagatcgcaccactgcactccagcctggggacaaaccgagactttgtctcaaaaaaaaaaaaaaaaaaaagaacgtattcgcaatccttacactacttcatgtcaagttctgttgtgtcaggtgccttgactgacactgaagaattctaagaaccagtccttggcctcaaagatttagaatctgattagggagacagagctcacccagttcaagaggcccagcccggttcaaatccaaactgtgcggcataaactatgagggggccttgtccagggagacaactgtgagggctggagtaatcagggagggcttcctggaggagagcctcaaagggagagtcaattaaacagaaggaaagagggaggccatttgcacagtgagttggaagaaggaagctcaagtctctgattccagctttattccctcccctctccctacaccacacgcacaagcactcctttactaaagacacttcacagtgggaagattcagtctccgttaccgtctgacacacacacagcgttttacaaagcatgggtgcattcgcgatctctcatgagatttaaacaaccctgctagagaaaagtgaagtggacattttatttcagtaaacgtttatgaagcgtctactctgtgccaggcactaaacgtttatgaagcgtctactctgtgccaggcacaggcacaagaagtctcagttcttgggagtgccataatcaggaatggacaaacaatgatcagatctggctttgcgccagtgtcacgggaatagggaggaaggaagggtaggcgtgggggtcaggacaggatgcaggaggaactggtgcttaggtgagcgaaggatgggtgggagttcacaaggcagacaaaaggcagagcagcactccaggcagaggaacagctcaggagaaggcccagacggcaggcttcctgggaacctggaatgcagagtgctgggaaagcacagatgaagcatgagtctagaagggaaagcgagaggttataaagcacctggaacaccagcccacagggtttgactttagagatgatggggagccgttgaaggtccaggagtcaggcagtgaagtgattagatctgtttgagagtgatatctgacaactgccccattttaaatgaggtaaccaaggcccagagaggttgggtgagttgtccaaagccacacagctaactagcttcagtccctagagcagagttgatagaactctaatgggttttatactcattgtcacccctccccaccatgcctttccctaccctctactctcttcctctcccttctgcccaggatgaccccttctcagctctggatatccatctgagtgaccacttaatgcaggccggcatccttgagctgctccgggacgacaagaggacagtggtcttagtgacccacaagctacagtacctgccccatgcagactgggtgagggggaacaagggggtcaggctatagggggcagggctggggaggctgtcaggcatcttggcaggaaccaatccgttgtcttggtagcaactgctgagggccacaaagcataagagaccagcactggatggctttatgcatgctgggcatttcagggagaccctgtacaggccaggggtttggtatcacctagacccacagacactccccatcctggcccgggccccccatggtacactcaaggctggcaccaagaagtctcaggaataatcaagtgctcacttctcaccttctgattcctgcccttttgatgacccatccccgcagtcatggggagtgcccatttggatggaaaagccctcttcccaccctatgaccttcccggggtggatggatgcaccaccccgggaatcatatgggaaatatggaaccaaacaatagcagtagtaatagaaacttcaggctgggcgcaggggctcacacctgtaatcccagcactttgggaggccaggacaagaggatcacttgagcccagaagtttaaggctgctgtgaaccatgatcatgccactgcactccactacagcctgggcgacagagccttgtctctgaaaatttgaaaaaggaaagaaagaaagaaagaaacttcaatattatcagtagagtccaatgttgtgaaacccctcattaactaaatttccatactcttcagtaggtagaaaataattactttttgattcattagaaagcacttaatttttaagatggagatcatgtaattttgaactctaggtcttgcctactcctatataaattctcctctaaacaacagccaaaattgaggccctctttgagcttcaggctggtgccaaatggctctgcttattttccccaaaataaatcttccttccatgtatgatgagaccccctccagtataaagaagacccaaagaaaatcacccaaagaaaaaaggcccaaagataagacccaaagacctaaagatttaaatatatatacagatacagaaggtttgtttctgagtttctgtagtgaccttggcaataccttgtagttcaggacaatcctgaggaacacagaagtgctggcttccttgaggaatcagtgatcaggactctcgagccccttgaaccccagcatagggcgggagggggtgagggcagcaggggtgggtgtctgaattaatgtcaggtctacgtgatggtgtcatcaagtgttccagataaaaagttttattgagccgggcgcggtggctaatgcctgtaatcccagcaccttgggaggccaaggcgggtggattgcttgagcccaggagttcgagaccagcttggggcaacatggtgaaaccctatctctataaaaaaaaaaaaaaaaattagccaggtatggtggcgtgcacctgtggtcccagctactcaggaggctgaggcaggaggatggcttgagccaggaagcagagattgcagtgagctgagatggtgccattgcaccccagcctaggcaacagagtgagaccctgtctcaaaaaaaaaaaaaaaaaaagatttattgattccaaagaggcatggccacacacacttagaccagcaggtgctttgctaagccctgatggaggctgccagacccgccgtcaagaggagctaagggtagtgtacaatgagcccacttagtgtatgacggccgctgccgtgggtggagtccttgtgagtaaccagccagcttgagcaggatgcactaatttgctctgcaaacccagccattgagaaatacgcctcagatgtaccgaactctaggtcctaggagtatgttggttggggtaggttatcaataccagcccacttgcagtggatgagctggtggccatttgtagtgaggaaagggatgtgtcaacctccatcttagactccacaattgagggatgtgaccaccattcctccccagccagcccccaaaccacgtttgttgctgcctttccagatcattgccatgaaggatggcaccatccagagggagggtaccctcaaggacttccagaggtctgaatgccagctctttgagcactggaagaccctcatgaaccgacaggaccaagagctggagaaggtgggtatatccagggatggccaagcagccacccctggatgcaaaggttctgctagaacctgaactcataaaggtcttcctgtccttagtgccccaggaagccccctaaagggcagatgtgggagctgggcatgaactggctcctaccagaggagagacagtacctgtgccaggtgcccagggcagaatcaggtgggcaccttcgccttatcctgaggtagtcagatactatttagttgcaaagtttcagaaaatcaactcaaactggcaaagaaaactaagcaaagaaaacaagagggaattaaggatttattgacccatgaaaccaaaaagtccaggtgtgtcatagctttaagtgtgctggatccaggtagtcagtgtaatcagaaatctgtttctcccatctcttgactctgctcccctcaaattggctcagctcccctcaaattggctccattctcatggtatcagtgagggccaccagcagtcttaggtttacattctcccagctcaacaactctgccagaaaaaaagtgcctctttccccatagttcagcaaaagtcccagggctgagtctcactggtccagtttggtcatgtgcccacccctgaacaaatcactgtggccagcggtgtggaatgtgaggattggcctgtcctgggtcacgtgccactttgggagccagatccacctgaatcacagagactaaaaacaggggaagagtggttccccacagggatatgggggtgctattatctgatgaaggggaaggactaaatcctggcaagatgaatgtgtgtctgtctgcccctccctcaggcagggacaaagtagaaatctgacattggtcatcaccagagtagttaccccttaacttccccttcccccaccaaccatatatcctgaagacattgcccaggccacatctgtcttttaggagactgtcacagagagaaaagccacagagccaccccagggcctatctcgtgccatgtcctcgagggatggccttctgcaggatgaggaagaggaggaaggtacaggcaatgggactgggagtgaaattatggcctgaggtctgatcagccacagagaggctaaggtttggggttctgggtgtggtgcagtagtgtgcctttgattaaatggcttccctctgtgtgcccccgttgtcccctcagtaagtggggataaaatgccctgattcaccctcagagggatggaaatgtgtagccacagagtgggttcttgcggcctgcagaggaggcagctgagagcgaggaggatgacaacctgtcgtccatgctgcaccagcgtgctgagatcccatggcgagcctgcgccaagtacctgtcctccgccggcatcctgctcctgtcgttgctggtcttctcacagctgctcaagcacatggtcctggtggccatcgactactggctggccaagtggaccgacagcgccctgaccctgacccctgcagccaggaactgctccctcagccaggtgtgactggcggcccatggcagaggttgggagtggggatgggggaagggctgagcccatgggcaccctggaactccaaatcactctctgcctgtgaaggagtgcaccctcgaccagactgtctatgccatggtgttcacggtgctctgcagcctgggcattgtgctgtgcctcgtcacgtctgtcactgtggagtggacagggctgaaggtggccaagagactgcaccgcagcctgctaaaccggatcatcctagcccccatgaggtacccgtctcccctggccaggctgggactgtgagcaagtcactgttctctgagccttagtcttcccatctataaaatggggatatacaacctgtcacaagcttgtgggggtgactcaaggagacagtgtgtgtaaaagtgccctccttgtgcaagaagcagggagaaactggcatttactcagccagatactgtgataggcattgtgtgtggttagctcatttaattgttaccatggccctttaaagtgagcgtctgcacatccaagtaaagattgttttctcctccctaagtgggtgtaatttgcccatccccacccatgagttcagctccctgccctcccctcactctctctccctcagccagcctcaggttttgacactgggggaacaggtagctgttctattaataatttcctgtaatgggatggataaaaatctcaaaggccacttgatgtcaaagaggtttaaagttgtccctgcccaattggttggccaacttggcttaaaaacacaacaggcaaacagattttctggccccttgtcgaggctagacctcacaatctaactgcactttttactttccagcctcatgagttttctgtggcccacagatatggcctccaagtttatttacttttactctctatttgccccagctctgtagttctgaaactccctggttggggttgggctgactctgggtcagccagccggcaggctgtccccagggccctgttcctcttggcaggttgtccctctggagaggactctgtgtcccaggaggacagctgctgagtcaggccgagccggcagctgagaaaggcggcagtcgtcagatgggcttgagaaactgaaaggctaacgaaaggccagcgcccctttgggcagctgcaggaattcacggggatacaggccagatgtctacaaattggcagaggatgccagacccatgaatgactccagagacacttacatgaaataattaactatctcattcagtaaacaggaagtaaatcaatggacaaatgagtaactcttcctctggctgcctcttaggttttttgagaccacgccccttgggagcatcctgaacagattttcatctgactgtaacaccatcgaccaggtacagaggaccgtgccacactatccccccttccagagacacctcggacccctgggggcttctcctgtctgaggctgggttccccagatcaggtgatcacagccctctgggaagaagccagtgtccccgatccgattataatgctgcttcagggctggggcctccctcgtgggagcctcacagtaaggctgagggaaaccagatccctttagcttccacctgagatcccactggctttctctagtaaagttccagcatattctgaaccaaggtggctgattgtatggagaatattcattttgattcagcctgtgttctttatttaccattgtaccagatggtgtgaaaacaaaatcttgattcctacctcagggagtttaccttgtagctggagagatgagatacgtgcctataataaagggagagcaaggccgggctcagtggctcactcctgtaaccccagcactttgggaggcggaggcaggcggatcacttgaggccaggtgttcaagaccagcctgatggccaacatgatgaaaccccttctctattaaaaatacaaaaattagccaggtgtggtggcaggtgcctgtaatcccaactacttgggaagctgaggcaggagaatcatttgaacccaaggggcagaggctgccgtgaaccgagattacgctgctgcactcaagtctgggcaacagtgagactcagtctcaaaaaaataaaggatcaaaaaataaagtgagagcaaaacatggcggccagtagcactctaaacacagtcaataccaaaattcacctcactctctccccctcgtctccctcagcacatcccatccacgctggagtgcctgagccgctccaccctgctctgtgtctcagccctggccgtcatctcctatgtcacacctgtgttcctcgtggccctcttgcccctggccatcgtgtgctacttcatccagaagtacttccgggtggcgtccaggtgatggcctcaggggtgaggggtgggaggtgctttgcaatgtgcagtttggtgtacttgctagactcatcgttatgagagtaatagggtcgtgttccctccaaaaaataaaaacaaaaaacagaaatgaaggaaatagaaatatccacatcttattccaccgccctaatataatagtctgccaacacacgcacacactgaggttgacatctgaattatttccttgggcgatatggtcaggactggaattgctaggtcatgataaatgcacattttatgcccttcattcattttgccaacatgcttcccaggagggttgcatcattctagtggtcaggctgattgctgatgcatgaaatcggcgggcacctgattcaagcagtgttatgataacacctcccagcccacgtgagtccagagtgtagctgtaagccttgacttgagggagcctctcacagccattctcatggatcacatttgccctcatgagctttggatccatgcacgcctctttcctcctcaaaattttctaagaatgttctctagggagttctttctgggagtgattctcccagattcatagaaactcatagattcaaaaaattgtaggaaaaaatttaaagaacgtctaggccagtgtttctcaaactgccaattacagcccatcagtgggtcatgaaatcaatatcatggatcacaaccagcatttttttaaaaatgaaaaaaacatcagactgtattcatagagtaaagcaagctttgcttcatgaaacctttgtgttggtcatggaggtgtgtgagtactgatttgtgagataaaatatatttctgactgcaggttgtggtcagaaaggttaagtacctttcccaagtgcacatagttggctagaaactagagttgagatacttattagcaataataaaatttagatgcattttggacacaattacctgccccaaaggatcaacatttgtataaatggctttttgcttggatgatccagaatggcccgacacccacacgaacaacatagctttttgacactcaaaaaattcaaagtgctgcacaagctgttctacaaagttcatttcttctgccagagaaacagcccagtctctgtggcacccagtctgaccctggagatggtttatcagggaaatcaacttcctgcatcccaaactggcctccctggcactgatgtgcttgtcgaggtgcagctttggggagcaggaggcaattctgttgccatggaaacctctggccttaccccgagacgaaacctatcatttcagcacatcactggccagggtctaaagagctccttgatggggtaagcggaagacggggttgaacgctttgagtttggtcttctgttcctttggccagctgtctcaaggttcagattgttcacctgtaaaatggaactagcactgcctgcccagccttagctcagctccaggctgtgcagcagaagtacagggacagatggcgacctggggttgacaatgcccaggacagcagtaattgtgccccacatcaggctgtgtctaagcattgtacataaacgatctcattcagtgctcacaaaagctcaatgggctggtggcattgtcttcccccttcacggggtaagaagctgaggcctagagaggtaaggccattcacccacacagcggtagcaggtggagctaggcttcaggcccaggccgagccctgagcctgccctcttaactgttccactctgttccccgccacagggacctgcagcagctggatgacaccacccagcttccacttctctcacactttgccgaaaccgtagaaggactcaccaccatccgggccttcaggtacgagtccacattcccccaaggtaggagtggaacaggggtggggccagggggcacaggccatgagatttgattctcaggactccacttgggaaggccaaggacacgttctctctcaagctgcctcaggtcccaaggcccaagggatatccaccagcagggacaggccaggtgggctcccactgaatgttctagagaggaaaattccagctctgtagacaagcccaggacctctgtgaggcagagcatgaaaagagacaaagctgggacaagtcttcatgtatcaacgctagaaagggccttaggtgcgggccaccctaagcccttcttttattaaggagcccctgtgtgccaaacactatgctgagtactgtacaggccaatcccactcattctgcactgcaaccctcggtgctgagaatggtcatttccattgcacagacaaggaaactgaggcacagagacgttctataacctctctgtgtaaggtgccacaaagcccagacttgaacctatttgttcatgcaacaaacatttactaagccccgactatgtgctaagccccatgccaggcactaaaaagatgagtcaaataagccgctgccctgcaggcgtttacagcccagactttgagcaggccaggataaatccacgtgacaagtattctgaaaaaagcggattcaagggctgtgggagcatagaagagagacagtccgggaaggtttttgtaccagaggtgtcatcagaactaggactcaaaggaggggcaggagttcaccaggctgaggaattcctgaaaacttcagtgcccctgccatcgtctcactaccctgagtggtgatgttggggtggacaggagcatctgaggttgcctggggaatgagggaagctgttgtttcccactccccaagagtctgtctgatctccagaggcatctctcttccagtcaggcaggccagagacccctgacacacaaagttgggctcttttctcatcttcatccagagagtgataataggttatttttagggtggcacagctgcacgaagtatgacagtaaccatgagacaccaagcactgtgtccaggagtaaccatagggcacaaggaccagccaagggccagagaggcttacatctcctccccccaacccctgaagtccagcttcagccctggagaggtatccaggcccctctgcccaccctggagcacctagggccagtggaaatccacctcttagggatcttgtctaagtaaagaagagcagagcaaagctctgccctggccttggcgctgctccctggacatcccttgcccctggacaagcctatgctgtgtcttccacaaagaagcttgctggggactggattatgactctagagtctcctcccagcctcctcttctcaagcctgaacttctcccgttccttcaacttccaggtccctcgacattactgagcctagcctttgctctaagttttggtgatttccctctctcaattggtgtctcagagggccctggggtagagagatggtgactcttctagagtgggccacagccccttgtgtgcagatcccagcttcctgtaaacagcctcagatcaggccaaacctgtggtcagccagagccactgctacccagtgaggtcttccacaccctactgacacggtgaatgatttttaaatttgaatgaaaggctttttaatcaaccccatacacatttaatgcattggctttaatccagcagcctgttgagagctattagcacttattgattgcccacttactgtatgccaggcaccgtgctaagtgttgtatgtgcattattacatttaatcctcacaaggaccacataacataggtacgaatcgccacattctccagatgcagaagcgagacccagagaggctgggtaatcaatccaaggtcacacagactgcgggggctggcgctgagcttggaacccaggtttgcctgaccttctgggctttcctaagagatcttattttttcccaaaagagtttcaagagtgcccagcactgggctcagtggcgggctcggaggttgttttcgttcatgtaggaactatcacttccccatttttttcataagaaaactgagtctcagtcctgatacacagccaggaagttgtgatgttcaggctccaacctgggtttacatggctccgaggctggggctcttttctagtcctcagacacactgtcgcacgcctgtggcagaagctcccatctcacacttgccgaccctcaactcacacagtcctgagacccacatacgctgagcgcctcacactcctataacacgcacatgccctgatgcacacacattttcaacacgcacttactctacccttcaggcatggtttcacactcactgcagacacgtcaccctcccacacgtctccaccctgggggtgtgcagtagcatgctctctcccacctcagaacctcccttcagtcccctcagacacatgccctctctccacgcagagacaatcaaagctgaactaacaccttccagggtgaaaagcaaatgcccagtaaggtacgtcttgggtgcctccgtgtcccctgagtttggtcctatcaaaccagcgatgatgaggcagcttttctttcgttccttcctccatcatcaaacaagtgctcctgcatctcctctgggccgggcctacgtcagcaaggtctgagggaagcggccaaggagagtgatgacggcagcccaggttgatcagagaaaggaggcaggtccatgcgcagtaactcagggaaaacatgatgaggacctaaggatgagaaagaagcctccagagttccctgtgcagagagattccatcaatttcagagggtcaggggagtgccatgcattcatccaacaaatatttattgatagtgccaggtgctggggtatattggtgaataaaacatcttcatggaatttgcagtctattgagggagatgattataaatagctagagaaatgcatgtacagcagatactgtggagcaaacaggttgcagacaataataggggaaacctactttatagtaaggtagtagccaggaagagcctctctgaggaggcagcatttaaggcaagccctgaaggttgagttgagccagccttatgaagagcaagggcaaaagccttccaggaaaagggaatagtgtgtgcaaaggccctggggtagggaagactttagtattgtcacagagcttttaaaaagctgagtggctgcagcatagtgtgtggggtgtttgtggcaggaattaggttggcaggagggggttcttcatcctataagcagtggaaggtcattaatattcttttttatttgtttttttttttttttttttttttttttttgaggcagagtctcactttgtcacccaggctggagtgcagtgaggtgatcttggctcactgcaacctccacctcccgggttcaagcaattatcctggcttcctcagcctcccaagtagctgggattacaggtgtgcaccaccatgcccagctactaatttttgtattattagtagagacagaattccaccatgttggccaggctggtcttgaactcttgacctcaggtgatccgcccgcctcagcctcccaaagtgctgggattacaggggtgagtcaccgcatccggccggagatcattaatattctaaacagtgggggagaggacacagtttgcgatttagatagattaagccagccactgtgtggagcatggactgtagggagacagcaggtagacgtattcaggaagctgatgcagtagtccaggtgagagtttgtggtgggcaggaagcaggatagagggggagggaggcaaggactcttttagagagagacataagaggacttgccaaggggctgaatgtgaatccaggtgattcctgggtgagaaactgggtaaagggaggtgccccttattataatgggaaagacctagagaaaatggatcttggggtgaaaacaagagtttggaggaggtggggattctggacaggtttgaataagcagaaaggagtggggtggacattccagagagggatagcttacatgaagtggccacggtggcatgtctggggactggaggggccctggagcctccctctgcaggtagggagactcctaggagctatgtggaccaacactgttcccttaggagcttctcatcctccctccaggtatgaggcccggttccagcagaagcttctcgaatacacagactccaacaacattgcttccctcttcctcacagctgccaacagatggctggaagtccgaatggcaagtgctattcccctctaccctggcctctgataggagggtggggccagagcaagagcacacaggtacctggggatgaaagagaggataggataccagatcgtgtggacaccaagccttcctgcttcccccagccctggtggtcctcctagtgtctagcctgtgctccttttccccatatcactgcctggaggcttgtgtatctgaggtgtgtgccagtggcaagaacagttgtggtgaatgtgtatctgcagtgggtcatatgacacccacattgtgtgtgtttgtgggccagctgaggcgtgcatgttaaagggtgtgcaggggctagggggtaggggagcatgagcttgtgggacatgttggctcctggggctccagccttcgcagcccttgtgtgtgtctggtgacgtgtgcatgagttgcagggctggagtggaggcctggctgagctgctctctgccccgaaaaggagtgaggtagaacaggggcctgtggctctaacccctgagcgcccaggtcagctcctctccctccccaggagtacatcggtgcatgtgtggtgctcatcgcagcggtgacctccatctccaactccctgcacagggagctctctgctggcctggtgggcctgggccttacctacgccctaatggtgagcggcagtgggctagggcagaggaggggtcagacaccagcactcccggagcaccttcgtcactggagacatgagacactcccaggccttaccccaatttcatttgcatctgatgccagagggacagtgcgggcaggaaggctgaccagcaggccccagggcccaggccccagacaggtggaggttggggagccacatgactgaccctccctgtgcctccagggagggctgctctgagcaggcagtggatggcagcaaaaggaatctggggccctggcccctctccagccttaagaagagccattctggtggctgaggacagaactaagcgaccatggagtgtgcgccactggcttgctccccacaggtctccaactacctcaactggatggtgaggaacctggcagacatggagctccagctgggggctgtgaagcgcatccatgggctcctgaaaaccgaggcagagagctacgaggggctcctgggtgagaggctcagggagaggggtggggaagagtccaaggaggagtgtgtctgggttgggggccacaagggagcctggggatggggtggcactttcggatactagctgtggcccatgcctggtggctgagcccagcccggcccccagcaccatcgctgatcccaaagaactggccagaccaagggaagatccagatccagaacctgagcgtgcgctacgacagctccctgaagccggtgctgaagcacgtcaatgccctcatcgcccctggacagaaggtcagagcacgggcccaacccaatgctgcaggacaggcgtgagcaggggatggggcatgcacggagctggatggcttcgcagtcacctcgtggccctccagggccgaggcctctcactattcagacatcgcagtctcctgccctgggcctgtgggggcccatctttcctctccttctattgccttcccccagtgctgccctcaggccttgtcttctcactcatccaccaaggagaccgacactctggactcccccagctcacacgggctttgtcagggcctccctctctgcgaatggtcaggggctttccctagggcactgccccgagcttcagggcagggacctgggggcagacagcgaggccacccttgtattgagggtgagcccctgcctatggccctggcccagctctcctctcgtttcccactctgtctctttgtctctgtctcactttgctgtggctgtccatgtcattctctgaccttgggatgtacctctgtccctgcctctctcatccttctatgtcactatctgtctccgtattgtaatttctgttggtacccaagtgccaggaagcaacgggatcagaggtggctccattgtagggcggggcacacagacacatccatgcataccactctcagctgcccctgtgtcctcctgccacacccatgcccatagagacacaccactgccccccagctctccttcagccaagtacccggcacacccagacccacaccaaggcccaggcaaatggacatccatgcctgcacttgcgtgccggtccctgtgtaagccctctctggacccactgcaggaaacaagcccaaacctgtggtgtccaaagagaaactagtcagaaaaccaggccaaaaagataccctgtgacctcccacacctgcacacacacccagagctagcatagaggctattcccagcagccccagagtcccagtggcggtgcctgcttctctctttccagatcgggatctgcggccgcaccggcagtgggaagtcctccttctctcttgccttcttccgcatggtggacacgttcgaaggtgagttgtaaggcgggcaccccacgtgtacccacagccaccagatgaggcctcagccctggcacgtggtcagacatgacaggaggcccagcagtcaccgccttcccctgcaccctcactgggacccatgcagggcacatcatcattgatggcattgacatcgccaaactgccgctgcacaccctgcgctcacgcctctccatcatcctgcaggaccccgtcctcttcagcggcaccatccggtgagccccaccacccctcaggcccacccagccccaggccggctcagttccatcagatctggagcacaaagaggagggggttgggggagaccaggatcccagaggtgtttcctgctcatgcccttctccatcccatcaggcccaggcagcctctggaaggggatcccccacccatgggtctaagatgctgtcccccacccactgccaccacctcggtgcttctcccagccagacctccaactcagtctgctctcgctcactgccctctttgccgcctggggatgcaggcaggaccctgctccctccctactggggctttctgtgccacttccagatttaacctggaccctgagaggaagtgctcagatagcacactgtgggaggccctggaaatcgcccagctgaagctggtggtgaaggcactgccaggaggcctcggtaactactcctggctatgcagctgggttggttgggcactcaaggaccctgtaaggatggcagacagaagcccgtgtctcaggtttgccccaagtttggagtctgaagcctggcaggaccatttagtcctacttctcactatacgggggcccagagaggtcaggtgtcttgccccaggtcacacaactggtcagttcagggtctggctcctcctgcagggtacagcgggtacagtcagggatccttgtgagacagagattgcgagtcccccatgccaagggggcatcttcagccctgccctgccccatccacctgcatgcccagttctgccttaggggaggagaagatggactgggcaatcatagacacgggtcactcatcaaggccaccggtgattggcaaagccttggtatatttgctgcagctcctggagcattgggggtggccaagccttggtttcaatgaatcaccctaccaaggccctacatacacactcagtgcacccctcagtgcacacgccccctcccagaactgcccagggccacagcagcacacacctccaggggtgcccttctcgttgcagtccttgcagacggcctccacattgttgtgtcaggtgcaccagccctgcacacgcctgtgctcttggacacacacccacctatttgcccccatgcacacattttccaacagccccccaagccatcccatctgctccactcacagcacaagattaactcagtcctacttcatctccccgggctgttttcagatgccatcatcacagaaggcggggagaatttcagccagggacagaggcagctgttctgcctggcccgggccttcgtgaggaagaccagcatcttcatcatggacgaggccacggcttccattgacatggccacggttggtcctgggcccctccatgggaccatggtcttggaaagggtttagtgggatgctagggagaaatttgcacgaagtagtcctgaggctcaagttgcctctaacatcaaatgctatgtgttgcagaaaatgaaaagagctggggggaccctgactctgtctagtcttagggaatgttacacacacacacgcacacacaaaaacactatgcaaacacacacataagctgcacacacagacccacacagacttcacactgtcacctatcacaacagcacacacacagccacaaccacaacctacatacacacacagagctgagctcccaacaggctgagtccagtccctgagtgccgggaacctgttcagtcctgtggggtgggggtgggactaggatcggggtcagatgggagctgagccacagacctgggctccacatcccccaagccaggccagaccccatccactgggcaggtgagccaacagctgttgcccccacttggcaggaaaacatcctccaaaaggtggtgatgacagccttcgcagaccgcactgtggtcaccatcgcggtaaggggcccattgatggggtgcagagggacacccagggacaggactggcctgttgtggccgtcatcagtgcacagcccctgggcttgcctggtcccagtaatcaagaaagaaccctgaagcaggcagttcagggcaaggggcctggagggcatgcagggagcctgggttgcaggatttggggtggggggttttgcccctgtgcttccctcagacctcccctctccttctccaggttccaaggcctgcccctgtcccaaggccttatatgttaggctggcgttacttctccataggaagtgggggaggggttgtggagggtctctgagccttgaagcctggaggtggggtagagttgggacttggagaggagagaagggtggtattagcagatggagagcttgtagtcacatccaccccaggaaagtgcagtccccacagtgacaggacattctggccacatgcctcatcctcctcctccaagccgcaggagggccaccctcagctgtggcccccaccgcgggtggtattcccaccatcctgacccgccccctcctgccctgcccagcatcgagtgcacaccatcctgagtgcagacctggtgatcgtcctgaagcggggtgccatccttgagttcgataagccagagaagctgctcagccggaaggacagcgtcttcgcctccttcgtccgtgcagacaagtgacctgccagagcccaagtgccatcccacattcggaccctgcccat

SEQ ID NO: 15326 - DNA, 83736 bp, Homo sapiens
aggcgcggcaggcgcgcggagccagcggagccagctgagcccgagcccagcccgcgcccgcgccgccatgcccctggccttctgcggcagcgagaaccactcggccgcctaccgggtggaccagggggtcctcaacaacggctgctttgtggacgcgctcaacgtggtgccgcacgtcttcctactcttcatcaccttccccatcctcttcattggtgagtgcgcgcagcgagccgcggaggaggggacgggagagcagggagggaggaggaggcgctgcgcgccgcaccgctcggcgtccccttccggcccgcgaccgccgtccgcctcgttcccggggtcccctgccctgtgtcctgcccgccggtccccgcactcgcacaccagctcatcccttcactcccccggtgcccccgatcccgcgccaaacacagcggacgtttgtgacccatgggatcaccaagttttgcttctgcagggccaagagctgggatggggaaaagggaaagaggaggtctcagcacgcagtgggaaactggagaggggtcgggcctcaccctccgtggcgcagcttagggagccgggtcacccctcccgcaaggcagcctccctgtcagccgcagctgggcctagggaagagggaagcctgtgctttggagtctgggatggaggcccagctaacccctatgctttcaccgggctgagccgcgcagtggtccgtgatctctgacagtcccaggcccgcgccctgggcgaggagaggcgagagctagggacttggattcccttcccccgccaccccacccgggcatgtgtctccagagcgcaacttctcaggctctgcgcaaagtagctccgactcgccgacgcagcgaccccggcgcccttgcttgcaaagttgggcgccacggccgggacaatcgtgcgtgcctctccactgaggtcccccccatctctctccaagaccttgactcttccagaccagtcaagtctatcaactcatagggtgtcccctgcatccccaaaacgtgttcattcactttaagaaaacaagcaaatcttaaaattcatatacagctttggggaagaaaggaaagattgtcacaaaattagatttacaagaggttgctgcagaagcagagttgctagttattaacaaagacagttagatagaaatagaaataaaacatacaaaatatgtgctcatatgtgcatcaaaaatcaaaaaagaacagcatttacacttctgttctcagccaaacggtttattaacctgatgacttgtcacacaagaagttagtatgtataatggggtaccttggcagggcacagtggcttacatctgtaatctcagcattttggtgggctgtgacaggaagactgcttgagtccaggagttcgagaccagcctgggcaacatagtgagaccccccccgccctttctacaaaaaattaaaaattagctgagcatggtgatgtgcgcctgtagtcccagctactcaggaggctgaggcgggaggatcacttgagcctaggagatcaaggctgtagtgagccgtgatcgtggcactgcactccagcagaggcaacagagcaagaccctgtctcagtaaaaaggtgtggtgggggaggtaccagcataggaccaggctgaatgagttggacgtttagtttgtgtgtaccagccttggggatcctcatgtgtaggtgtcaccctcaccatggacccaatgcccaagcacctttctggggttcatgcaccctcttcctcctccaagtgggcaggcatcctgcctctgactgtctctccctgcaggatggggaagtcagagctccaaggtgcacatccaccacagcacatggcttcatttccctgggcacaacctgcggtggatcctgaccttcatgctgctcttcgtcctggtgtgtgagattgcagagggcatcctgtctgatgggtgagtgactgtctgaggactcaggaaagtgaatctgctccagggtacttcctgaaaggcccaaggagatcctagctcacctatattccacaagcccatgtcttttgttactacatccagcagctcagtgtcttctatgtgccaacctctctgagctgggcactggacgcaagtgagtcccaggccctgccatcagtccaggagagcagagggaacacggacctgcatgccaagtcccagtgaaataatgctagagcctattagaatgccacaactccagtgaaaaatgtctggcctcttctacaacctgccggagttaccttcttggaaaaaaaaaaaaatctaaccatgccacccactcttgcataagacctttccttggttctcagctgttttgaagatgtggtctcagatcctcagcccaccattcaaggtcttcacagtcagccccacctatctctggcctcattccccatgcccaccttccgtttgggcctcacagcacactcctcacacctctgctacagcacagatcacactgtatgttaaagtttatgtctatttgcaaaactgtcttcagagtcagaaaggcctaagagttagaatctgagtcttgttcatctttgtgttcacagtgcaaggcatgtgataaacataaacattattcagtccataaacatttattgggtccttaggagaatgaatgaaaccatgttacaaataagtactctgggaggtgagaggaaggcagaattgggcaagctccatggttgagagggctttggagcggagtctggaagggtgactaggcttcagacacacagaggaggaaggagagagagaactggtggtgcctgagggaagggaaaaggcaccaaagagaaaagcaggtagggctagggagcagcgcaggggctggagcattaaacacaggctggggagcgatggaggctgaggctgggaacccaggttggggcatctcaggaggactgtgaatcccagcctgcatgtttgggtcggatttggtcagcagtttggaacagaagagagatgtcatcagcataacacttttaggtgggaacctgaggtgttcagcgcaggctggaggcagggagaatctagaggtataatagaagcaggacttagcattgactgcagtagtctaggtgagcaataactgcagacagaaatggtgtgtcagcagtcagggacagaagaggagcgggagcagccatctcactaaggaagaatccagtaaccagcaaggatgagagactgccaggagagggagtggtggaggagagggatatttggcttgagtatctgaggtccagcgccccctgagctggaatcagattatacccagactgcactcctgcagtgctgcctggctcctgtagttggatggcaggggataggctccctcatcctccctcccgttccccaccttcccttccccaatgtccctgcatcctggcttcagcagtgatctctaaaatacctgcttgacttggaggcagcagctctgcctgcttattaaagtccctagaccagcaagaagaccagaaggcatactgctacacaagcacgtgacaagtccgcctccacccccacccctacaccccttccaaagtagcacaaatgccacagtgagccctcagatgggaaatactcaccagatggtgacagagaaagacacctccgcccttggagaaggaagacctgggtcttcagtgagcactgctgctgtgtaccagctatgggactttgcacaagtcattcaggctttctgggcctcataagcatttataaacatacgataaaacattttagttgccaacttaaaaatgtgtgagaaagtataaggtgtttcaaaattatttcaaggagtaaagaggcaagagttttgaagatccctgggcagggtgttggctgttcccagtgtggccattcatgactgctctctggccttatgaaacaagcatcatagtccctggcttgcctgcttcatggggctgtggagggtgaaattcgagcatggacagggtgcagagcccggagtggcagagcactgggtagactgtgtattcccagaatgtgggaaactggaatgaatcggtccagggatgccctcctgctggctgtcagcagcccctcctgtgtgtggctgtactgcttcagctcagtgcaaagggccatctcctccccagggcacagatcagctcaagctgagtaattgtcatctggtctttgtgagctcctacccccaggcctgagtgaggggcaggaaaagagcagacaggagaagtcacagacccttgtgatacctccagtctaatccagcctgggttttcagagctgtctggaaatttagggggcaggtgggagggggctgattaaggcagccctgatttgatttagagtgagcctcatttagtgactaattaagccatcttaaacctgtagggcttcccctcttcctttgggtattatttctttctgtgatgttctgaattcagaacaatcaaaacagtataagttagtgaagaagatattttttaataactacaatattttcccagaccaccatacactggataaagcctgtatataaaactttacctaatttcttaactaattgaatgtgtattatttaacaaagcagctaaaaactattctatgaagccatgtcatgaaatatttagttcaattatggttaatcctcatcttatttcgtcttataaaattttaacatttctacctcctattgcaaaaaaaagcatttatatcagcatataataaaacatgtctagatgtcagcttaaaaatgtgtgagagagtagagggtgtttcaaaattatttcaaggagtaaagaggcaagagttttgaagatccccaggaagggtgttggctgtgcccagtgttgccattcatgactgctctctggccttgtctgtcttgtaccttctatattagtttgaagaccttttttggagaatattcactaaagaatatcaatatctaccatttcattaaaaaagaaatgtggagtttgccttttcaagttggtttgatgcttattgatgttttcagggacccagcctcttcccatctttccataccatcctgtgtgtgtgtgtcagcctatcttccccatggtcacaaggtggctgcctagctccgggtattgcttagcatgagcagagagggcatgctgccgacatgcctctcctttatgacagagatcattctttctttgacatctcactggccagaatacgtggaccaacactggcaaaggagtatggaattgcatggctgcttaaaccaatcaccatccattccctggggctgggtatattgctgctggagcaaacctgtggtcctcctggcacagaataaggggaagatactctttggtggacagcccacattgcctctacacttgcacctcagtcccaccagacccactgaggtcacaggatagctctcctcatgtccttcctccttctctgttgaactcttatgtatccttcaaagtccagcctggtgccacctcctctgggaagctgtccttggttgcccaccccctcctttgtgctctctcagtctctgtccatcggcagtatcacttccctagcctgctgactccaacagttagctctgagcatggcagccccctccataccatcagcttctcaagggcagggacccttggcacactggatagaagtagcctggtgggcaacagcagcactgaggcagcaagctgtagcaggccatctgggaatggagtgggtaccacagggctggagcagaaagggcaggctgggcagatctgataaagtggctggaggccacatagcctgggcctttcgttccaggctgagcagagtgggttttgctgtctgcaggagggagctgtggaagggcatgatcacgaccaactaaggtgaccctcctcaccaggcccagggaagactgaggcctggaaggaggctctggctgcctctgggtcttacccccaggccacagtccacccacttagaggcctctgtgagttaaggtggagagactatgagctggtattgactgctccattccccatcccgagagaggagacaaaatcagtgaccttggaaatgcctcttcgtgcctcagtttcctcaccccataaaatgggagactaagagtacccactcgatggggtttaatgaagattaaatgggttaacatatatcgcatgcttagaacagtgcctggcacagagtaaatgctccataaatactgactctcatcagtttgttatcacagcctctggggagggcgccagtgctgacttatgctgttcgtgttaaatggggctgtcactgggtgagttgtggcatacaggcccctgcactgttcaagagaccccagcaacccttgtgcttagggctcagcacatagtaaggcctccagatcatatacccagctctactccatgtactggcagctctgcccagcccataccccaaatacgcccattaactaaagggccctgcagcctataaagtgatgctataaaggttcagtgttcagcctttgaaattcaaggcctgggctgctctattgcagtacttagcatgtccccatcctgtctgtttctctctcccatctcagggtgaccgaatcccaccatctgcacctgtacatgccagccgggatggcgttcatggctgctgtcacctccgtggtctactatcacaacatcgagacttccaacttccccaagctgctaattggtaggtgaggtgtaggagggaggggcagtaccttcattcatttcttcagataatgtttactgaggactcattatgtgccagctattgctctaaacagtagagatttggaatagaaaaagaaaaaaatccctgccttcatggagcttacagtctggtgaaggaggatagacaggcaaagacagtgaataaacaagcaaacaaataggtggtggggatgctatgaagaaaatcaagctgagtaaggggtaggggcaatgacaatgttgctatctacacaggatggtcagggaagggctgtggtaactgtgggcatgcagatatttgggggaaggtattccctgcaaggggagtgacaagtgcaaagtcctctgatagggatagatttggcaaagatgtcactgtgggcaaagccaaatgagcaaggggaagagtgggaggtgagggcaggcgtcaggagaggagcgagcaagagtcccaggctctgggcctgagagcctgggtgaactgtggcatcaataactgatgtgacagaggagggggaggtgggctgtggtggggataaagttttctactgggggcatatcgagtttgagatgtcacagagacagccaactcaagtgtcaagttgggctttcatggggaggtcaggacaggagctacactttcaggaggtgggccttgtagatgacatctaaagcttgagcctggggctggctgccgtggctcacacctgtaaccccagcactttgggaggccgaggtgggcggatcacccgaggtcaggagtttgagaccagcctgaccaacatggagaaacccccacctctactaaaaatagaaaaattagctgggcatggtggcacgcatcggtggtcccaggtactcaggaggctgaggcagtcaaatctcttgaacccaggaggtggagattgtagtgagctgagatcgcgccactgcagtccagcctgggtgacagagcaagactccatctagaaggaaggaaggaaggaaggaaggagggagggagggaagggagggagggaggagggagggagaagaaagcttgagcctggatgaggtcacctggggagagaagagaaaggctctgggaccagagcttgaggtttgctaacatttagagagactcgggaaggactgcccacttagagcttctgagatgttaaatactgcaggactggggtcccaggcagaagcaacaggatgatggttggtgtttactgagcatgtgccatggggcaggctccatgccatgttccttacattcattgtcccacaggctaattcccccagcctccttattggtattgttaatatccccattttccagtgtggaccctgaaactgagaggttaaaaataataacagtaaatactcactttgtacttactgtatgccaggccccatcctacctatgtgatatattaattcatttaatccttgcaacaactctatgaggtaggtaccattattattttccctttacatatcagaaaactgaggctcagaggttaaataactggcactagtctagctcgtcaaggggcacagccgggagtctagcatctgtgcaatctcctaatcatttctgagactgcgtgtctaagggccctcagacttcgtccttggggtaaaggtatcaatccgcaggtctgcctctgtgttggggttcagcctgtgtgtctaaggctggggctgtacatctggcagttagactttgttcacactatgtccttaagtcagactgatttttaggtatcacagcatcgaattgacatttggagtctggcacactctgtgctaagccagtgacatcatggtgttgtcagggagtacagggtgtttcttgcactagtcacaggtctgcctttctgtagaaggtgggatctgagctccattaggattatccaggtgatccccctacccctagcccaggggcccccacatgagtatgaatgggagctgggggaagcaggttgagaggggagatgttaaatacaggcttcagagagccaccctgcttccatttctgaagtagctccttgtctgtagagaacccttcattaaccagggcctggctgaccagtgtcctctggaaacaccctgtctggacatctgaggagttcattttctcattctccagcaaacacataatgttctctctttaaagcacaagttatcacccgtggatggatttgtccttttctaaggaacaaagactaactccctccattccccttgttggagttatctccccttgaaaggacactccacagagccagaaattctagaacagggaaaagtggaggggacgtgcctgtgaactgcagggacagaaggaaatgggtattgggagaatggccagccctccaaggggctgatgtctggcctgggtatggagtcccacagaaaggggacctgtgatgcagcttacattgtcccgtgagggaaccatgatcctggaacccagatgaggccaaggaaatgttctctgaaaaagtcatatttgagctgagaactgaaggaactaactgggagaagggaggaaagagtgcttcaggcagaggaaacagcatgtgcaaaggccccaaggcagaaggaacaaaacacattagaaaattcagaagaagaagagtggcgtgggtgcaaagtggaggggagctggactttgggttttgtttgcttgtgcccaggctggagtgcagtggcaccaccttgggtcactacaacctccgcttcctgggttcaagcggattcttgtgcctcagcctgctgagtagctgggaatacaggcgtgtaccaccacactcagataattttttgtatttttagaagagttgggatttcaccctgttgaccatgctggtcttgaactcctggccttaagtgatcaggtctcaacttcccaaagtgttgggattacagccgtgagccaccgcacccacctggaaggtcataccacagatgtttgcctttatcccaacagcaatgggaagttgtgtgtgtgtgtgtgtgtgtgtgtgtgtgtgtgtgtgtgtgtggtttaacatgtttaacataaaatttatcatcttaactgtttttaagtatagtgttctgtggcattaagtatattcacagccgggcatggtggctcatgcctgtaatcccagcaccttggcaggccaaggcaggtgaattgcttgagctcagaagttcgagaccagcctggccaacatgccaaaaccccgtctctacaaaaaacataaaaattagctgggcgtggtaatgtacacctgtagttccagctacttgggaggctgaggtgggagtatcatgggaggctgaggagagaggatcagttgagcctggaaagtggaggctacagtgagccaagattgtgccactgcactccagccaagattgtgccactgcactccagcctggacaacagagtgagaccctgtctcaaaaaaagaaaaaaaaagtatattcacagtgctgtgtagccatcaccactatccatctccagaactttttcatcttcccaggttgaaactctgtactcattaaatgataactccccatttctccctccttacagcccctgacgaccaccattctactttctatctatgaatttgagcactctaggtacctcatctaagcggcatcatgcactgtctttttttttttttttttttttgagatggagtcttgctctgttgcccaggttggagtgcagtggtgcaatctcggctcaccgcaacctctgcttctctggttcaagcgattctcctgcctcagcctcctgagtaactgggactataggtacctgccaccacgcctggctaatttttgtatttttagtagagacggggtttcaccatattggctaggctggtctcaaactcctgatcttgtgatctgcccacctcggcctcccaaagtgctcggattacaggcgagagccaccttgcctggcctatttgtctttttatgacttgcttatttcactgagcataatgtcctcaaggttcatccatgttgtagcatgtattgaaatttccttcctttttaaggctaatattctactgtatggatatgccacattttgtttatctattcgtctgtcagtgggttgcttccacctcttgactcttgtaaatagcactgctatgaacatgggtgcattgaggggttttcgacataatcataataattgctttatggagaccagcttggaggagaacaagatggggaggaagtgtggaaaccaatgagaaggctctcagggtatagcgggaatacagaggacgcatgatgatgcctggacttaggtggtaccacagggatggagagaagtagatagagtcaagctatttaggacgtgaaatagacagcatttgttaatgggagaggtgtggggcgagggagaagaatagagggagaaggaggagtaatgggagctcaccagcagcccccatgttatgcctctttccttccttttccctcttctctcatcaggcattcagcttttgctgagtacttctgtgtctgacaacaggctgagcactcagcactgcaggacaggactatgcaaaaaacctctgggcctagtcctgggtgcactgctaattccctgtgtgaccttgcacaagacatccaagctctctgagcctcggattccccacctgggcaggaagagtaagtccctgcctaagtcatagggttgtaatgaagagcaaagcagaccatatctgttaagtgttagggacaagacaagcatgaggcatattttcaagtctcggctcctgtaggcagctctcactaagggctaaagggcttctgatgcctgggatagaatctgtccggcagagtggagtggaggcagggggacagccttcagctgtggaattcctccagtcctagagaccagcctgagctgggggacattattccagtcctgaggcatgagagcagaaggccgatgcttctgccctccatcctaatgtcctcctgcagggacccaaggtggatggcatcgatccccccgggtgagctcagccctgggcgcatggtggggcccaacatctcaacctgtttcctaaccctgagccaggcaggacagatcccagatttgtgcccaagagatgctctggcatccatgcccaggcccacatagggatagagggcagggtgaaagtctctctccctcactcgggtcctctggagaggggctctgtgtcatgaagctgaccttatccgcatctggtctaggagggaggagggaaggagctgccagtgctaaaatctcccccaccctcaaagggggacttcacaggttattgctggttttggttgttggaagctgacagtgatttattggcagattgaagtgagtgtgtgtgcgagaatttaggatagaatctactgatagcttctgaggtttaccttccccaggtcttaaatctggagataataaaaatataacagctaatgtccaaagagcacccgctgcgtgtgaggctcactgcactaaatgctttccatatgtttctcacaagaaccttctaggtagcactattatgattcccacttaatggatgaggaaactaagctctagaaggctaagtgactaatccaaggtcacacagctattatgtcacaggctctgagcccaggtgtatctggctgcggagccaccaccactaacccctgtataacgctgcctcacagaactgtggctggctctttccgtatcccccatgcccctgctccatcatcatgctgtggtgggctctgaactgtgaggacagggatccaggctttcaccctctctctgtccctagctgccagtgcacttgggcaaggtcacatcctatttctgggcctcagtttcctcatctgtaaaatgaaaggctggattgaatgacctttaagatttccctcacttggaaattccacaagtaagtcattatagcatggagcttgcatgcatgggctccagcgtcaggccagcccagctctgccagttaatgggtgtgtggccttggatctgttacctaacctttctgagcctcatttcctttgtctgagaaattgggggtgacggcagtgtactttctttgaaaagttatggtgaggaatagataagatcatgtgtttaaagtgcttacttggcacagtgcctgtaacttagttaaattcaataaataaatttcccattcttcccatgatcatttatttttaagggacatttgtctgaccagtttgatttatgagattattggtgtttttcatgaatgttaagacgtacgtgcgtcatcttagagtcatgtactctgatatattcacacgtgcacatccacttactcggaaatgtacacacccaggcacgcttattctgtctccttctctgccacatacttgcacacattatgtgagtgtacacacatgatgcacacacgtctctgcgatcttccatctctcctcggcagccctgctggtgtattggaccctggccttcatcaccaagaccatcaagtttgtcaagttcttggaccacgccatcggcttctcgcagctacgcttctgcctcacagggctgctggtgatcctctatgggatgctgctcctcgtggaggtcaatgtcatcagggtgagggtaagcaggccacctgggccagggtggggtgggaagcagaggctctggcctctgtcctgccctgggttcaggcccccaccctgcttctcagccaaactgagaagggatcagcttgttttacccgcccgtgtaaaggggagtggggccgtggcggaaatttcaggatagacactgcatctggcccacgtgtgctctaccccagggtcccagagggagaggggggtgatgggtgtgttcgctgaggttggcggatgactttccgtagaaagggaagataagcatcaggcactggcctctcctactttctttcttcgggggtgggggactttgctttaatgtattcatatcgtcacgctggtaaatgaatgagtaagtgttttgttttcctttctgtttgctcccgcctccctctctcttcctcaccccagactccaaccttccccttcccctgcccctacctccccaggcagcccagactaatgaactcgtttgtctttcccatgctttgtttttattagtataataccatatgtgtctgtctaaataaatacctattcaggttttttcctctcaacacaagtgaatatgtaggtttcccccacggtatttatcttgtaagaatgggatcatattatgcagttttctgcactgtgcttttctcacccaacaaatatctcttgggactccctccaagccatctgatatggctaattccgttttcttaatggctgcataatattccatcgtatggatgagccataatgtgttcagctatttctctatggatgggcatttactttgttgccaagttcttgccttcatgaataatggtgtgttgaacatacttatatatttatgtattgctgcttttatttctatgggagagagtccaaggaatggcgttgctgggtcaaagggtctgtgtattttaaattttgatcagtgttacatattgccttccagaaagactgtaatctgccagcaatgagtgagaaaaccctttccctgccttccaaccagcagtgagggctacagccctttcgaacttggactgcctgcatttctctgactcttctgcttttagttggtgatctgcagggcacaaagctccttatgtgtccccccatccagtgaccctcacaggaaccctgtgatgcaagcaccatcccctttatagatgaggaaacattttagatgaggcttgtccaaaaacaccttgctagtaagtggaggaggcaggattcaaaaccaggtctgcatgacttggagttctgtgaactgtatatgaaacatggtggtatccttagatctgtggagaagatagcatatgagagattcctgctcctccccaacccaacctaaacccaacccagcctagccatggggggttcaaagtcgacctcaatgagcagttacaaagtcaggatgccctgacattggtggccaagaagtgttggggaatccttttcctggtaataattacaggcgaaagatggccccatctgttagagatcaagtgtggaatatcacaaccccagatccttgctggggcaaggtagggagtggtgagaagttggacttacccatcccccatggcccatgtgccccacagagatacatcttcttcaagacaccgagggaggtgaagcctcccgaggacctgcaagacctgggggtacgcttcctgcagcccttcgtgaatctgctgtccaaaggcacctactggtggatgaacgccttcatcaagactgcccacaagaagcccatcgacttgcgagccatcgggaagctgcccatcgccatgagggccctcaccaactaccaacggctctgcgaggcctttgacgcccaggtggtcagtgggggcacagccacaccatctattcactgccttctggtttagggtcacagagagggacctcaaagggcattaggtcaaaatcctggtgggacaagaggggaaactgaggctggtgaggggaagaagcttgccttaagtcacacagtgaaccagggacaggtgcagggctgaggattcataggacaggcacagttggaatggcccttaccgtttaggtcgtctagtccaaagtccttatccagatggggaaactgaggctctgagaagggaagtgaccccactggactctcacatccctgtgctctttcctctgcagcttactgactataaaggttggagtgttcacttgatttggagcaggggtgttagtggcctgatccttatggtaactctatgagttgagccagacaggaatctccccatatcactgaggagcaaattgaggccctgagaaaggctgtgacctgcccagagctggccacagctggcaggcggcagaggcagtctcctggctcccagtccagtgctccttcacttcctctgccctcgcaccagggcagttgctgaggcagacacggtggcaggtggtaatgagtgagtgtggcacatggccacctcctcattccagtgctgtgctcatcacatagtccctgaccagctgtgtgaccttgagcaatcatctggccttagtttccccatctagaccatgttggtgttgatagggccctcccaactgtgcacttgctgattccatgatctcttcctggagttcacctatttgcagaggatgtgaccactgggtttccccagacaacaggagctaggggcatcctgggaggctaggcccagccgtgaattagccctcaggcactctgacctggccatggtctctctgggcagcggaaggacattcagggcactcaaggtgcccgggccatctggcaggcactcagccatgccttcgggaggcgcctggtcctcagcagcactttccgcatcttggccgacctgctgggcttcgccgggccactgtgcatctttgggatcgtggaccaccttgggaaggagaacgacgtcttccagcccaaggtaggcagccccaggggtagggtaaggcaccctctagatggttttcagttgtttctgagagtgcaacaggccaatgtgtgtgagccatggccacactggagtggctcctcacacatgcgcaaagcccatagcagtatccccaccacagaatactctacatctggtcaacagaaatgccagagggcgagcctatgccccaagggtatcctactctcctctcaccgtcactaccatagtacctctcccggtagttaggtcagtccgaaaactgcaggaagtgcttttgtttgtccagtgtctagagcttctgtgacttggatttgttggctttcagttcatgtcatcttagtaaactctttaaaagttttcaagatctgtcttcttcagtcctgtaaaggctggcacttgagctttctgcaggggcatcttgggagctactgtcagaggagagagaagtgggaaaccctcacgagtggagctttgtctctccccactccaaatttcattcaaagctgcccgtagttttattaatatgttggacttttccattaaaatttcttttttaagaaaagtttccatggcttaaaaaacactggagacttattagactagattatatccaatggccttggcagttgtaacgattctgcaaactgaaatttgttggagctagaaaacctttccccggggttatttgccctgcgtggggccgtagcatccacttcgggggctgggcagactgtgctctgttgtctgtttccttgcagccgtttaggtttaaatggccacaaaatgaaaactttttcacccctaataagtttcagagttttagtttccaagtgaggatgtcattataacattttaaccacagacagtctgaaaataatgcagagaatggggaattagggtttttaataatttatgacaccctttgcgtaacatttgttcatctcatgagctccaaaatcgcagccagcagttaatcctcaggaggtttatgttcatttttctggagacataattagtcagctgaacagttttggccacagatatgagatacgttgagtctgatttatgcagcaaactttcattgaacactgctgtgtgccaggcctgggttgggctgtgggaatatgaaagcaatagttatgatgaggatgattaacaatattaacagccacttactgaccacataatacatacctggctgtgtgcaggagttatccatgtgttatttaatccctaaaactatcctttggcgtgagtatattttgcaacatctttactgtggtatacctcaaatactgtacagtttatgagatgataggtattcttatccccattttacagatgagaaagttgaggctcagaaagtttaagtaattttccccagggtctctcagctagttaataacagaggcagaatttgaacacaagactcactccacagtctgggcatttacagccaggaagctaaattgactattattatcaagccatcacctctggctccaaggattatgaaatccaacagtgaggagagaaatcaaaataaaatacttttatgctatgtgttacatgtgactcttaggaggaatattcagggaattgtgggaaaagatagtgattaacttagccagtggtcatgaacagcttcatagaggaggggatgtttgaaaggggtcttgacggatgagtaggaatttgccaggctgccatgggaagatttcttgctcaaccaagaatgcaaggaccacttttgcttatttaaactttgatggcttttgaagccatatctggctttttgagcctctctactttacctggcccataaaagagaggggaagcggctgcttctcttgtctacaggagtgtcacctttggctctagcctgaccataggctaccccagaatacccccattggcgatcctgaagcagcatggagccagttgttaatatcagggggaaatggcacaggccagagcccttatcagagtgtccacaccacgctcttcttcctgtgtttcccaaaacccttgtgggattctgctaaggagagagctctgaggcaggacgtgccaaagagatggcgaaagcacttagaattttagttcatctgaacgttatcattgccgtttttttctctttgtttatacacaaaccctggggtttattaccgtctcattggaatgctcttgtcccagttacttagcacacaaatccctgagacagatggccctgcctcagtggcagtgggccttatcagatttaatattttttccctgcagcccaaacacaatcagaaaatttccgacacagaaacaagagttgaaagtaaatatagtctccagtgtccgcaacaaagaactctccatcatgtggttgcctgggatgtggcttaattctcatgtgggcttctgagctcagaaaatgggggaaagggatcatttactgagatcatttggttcatctcccagcccccaagccattctaatccagagagaaccgagtgctattctggtctttatgaatgacaaagaaggaagctccctagctacatgttgcagtgtttcacagtctgggagaggaagccgttttttctgcccagcctgaatccatcctgcagcagttggcacagcgaggcacctgtggtttattcatcatcactcttccttcctaagatactcagagttggcaagaaacatgtcatccttggtatccgcaaggacgaacatttctgatgtcctctttagttactgaaagtgtctgtgacttgccagatctttgatgctcctgtcaccccgctgccactccccagggaaagctgggacccaggttgggctctgcctatgatctatagctctttccagcctcctctccaacccaacccctactcccaatctgtcacctcccatggatgccactgatctggctgaaggacaagagaattagattcataatgagctgctggtgtctgaaacctgccagcactgccctgggctatcagttgagccaaaggaagaaggaacagtctgggtttgatcgaagggctaaagcttcaaacagcctctaagtctcagtaggaaaatgtgtaggtttgggagggtgtatgtgtttccgaatgagttcccctaagaactgcttatggttctatatgtgtgttctgtttgtccctgtgtcttttggtgtgtctttttctgcgtgtgtgtgtgcatgtgtgtgtgtctatgcccccgtttggattgccatatttgtggctatcattatgagtgacttaatgagtgtatatgcattggtgtttctgtgactttgtggttttgatgcatgggctggcctcttcataaccatgtccatgcagctggtctggcctagagtacctgccttcaattcactagctccttcttggccatcaagactctgctcaaatgtcacctgctccagggagccttcacctggttgaattagatgccccttatctgtgctcacataacatcctatcaaagcgccctgtttctttccctgacttgatcctctgtcccctattgcctgacctctgtgtgcccagcactcagcccactgcctgacacccaggagatgcacgggaaatggttctgcaaagaaggaataatgcagcaattactatatattgagtgcttacacttactgttttttcacatgcactgttacattgacttctcataacaactctctgaagtcccttcatagcctcaccttacagatgaggaaactgaagctaagagaggttgaggaacttacctaaggacacagtggctaatatatgatgagtcaggacctctaagtccaggctcttaaccaccgtgtcaaacagtcttgtatgaatgggtaggtgtgttggtctctgggtggccaaagataattttattctttacccagggcctcccggggctgggacctacggacaactcaccttttgacacctgccaaaataggaaacaagagtccaagtgatcccctctcctttaagcaccagagaacatgtgaaggggacctttccaatcatacctctggcctggcagagacaatggggctccaaactgtagagtcgggagtgctgggttttagtcctacctctgcagctaactcatttattctcctcagcagtcacattctgcaagcctcaaatgcaaaatgtgtaataacttctgtagaaagtacatgggggcatgaagatcattggcttgattgcttttaaaaaatcggtattgagcactactggggaaatccctggaaacaaacacaattcttccctgagagcttgtgaaaatgcaagactagggcctatgattttccaaagcattttcttccaccaagtgtcaggttgtaggtccttggtcttttctctcttgccttggtacctgcagggtgctgaccagtgctatcatatcccctccccgtttcctaggaccctcttctcggtagactccaacagggcctgccttccttgggcagcatggcaggcctcttggctagtctagtacccacttcttttttttttttttttttttttggatggagcctcactctgtctcccaggctggagtgcactggcgcaatcttagctcactgcaacctctgcctcctgggttcaagcaattctcctggcccagcctcccaagtagctgggattacaggcatgcatcaccatgtccagctatttttttgtatttttagtagaaacagggtttcagcatgttggccaggctggtctcaaactcccgacctcaggtgatctgcctacttcagcctcccaaaatgctggaattacaggcatgacccaccacgcctagtcaggtacccacttcttaactgaaacttagctattccaggttctatcccttttaaaccaactctttgaagagaggtctaataatgacccaatgacttatagctgcagtgagatttttattttaacaggtcacaaaattctcaatccacaaaagtagatttctgaccctaggttattttgttgggggcggagagaggaagtcaaaggttttgcagcctttagagctgcaaaaccagaatttgttgttttgttaaaaatgcacaaataccgacgagtatatttaagtaacacccatagtctaacgaacaaacatgatcagttggcttttccagccctcattctccagcctgtgtgttttctgctcattgtaacacagcgtgtgtgtggcattccatgtttctccagagctttcatgagaatcagtggtcttggatgcatagtgttcccatgagtaccttaattacctaaccattccctgtggttggaaatttatatgggtttttgcattctccttctgctctgaccccaaaataaatgtctgtgttcatacagctattaccttatgtgaaattattttctttgggataaattctcatgatgtgttgttgctttaaaatagtggactccagtctccagagctgcgtctctgcagaggacagtgggacagaagaatcccagggcatgttaaaaaggaccgggtcttcctaaacccacatgcctatatttctgacccagtaccagccaggggggcaagtttccatcccccacaagtcacaaacctgtaactgacactaggatgcttaaggtcaaaggcctggacgaggcctagacagtgggtctggggtagtgtttttgacatcactcaggttcatgttcacatgttgtccccttaccagcatgtgaccttgggccagccactaaccctactgaaactcctttttttcatgtatgaaatggggctaataatggtaccctcctcattagggtattgtgaggatagagttttgcacctgataaatattgtctcctgccccttcctcccctggaaattcaggtctctccctgcagcctaattttaaggcccatttttctgcttccagcccacccctgcccttctaccttcgacctcctccctctgcctctccctctggtgcactggcaaatgggacagagagcctcggtagggccttcctcttagagtcttgcacgcatccctcagtggtctccctgtggctgcttcctgctgccaccaacagatacagacccctgtcgcacagatcatggtagagacagtggtgagcaggaccagacagctccagggagcagtgagggctggcttagagaacctctgttaaactgagaggccaccatcaggaagctctgatccaagatccaggaatccctgactctagggaaaggcctccaatgagagcctgggccctctctgcctgattctgattgtggatgtgccctcaaactccttctcatcactttgttccatccctctttaccctgcagcagctcccacaccctgccaaacaggatgcacagtccagggcagtgtctgagaaagagcagagatctgtcttcatggaaatattgatgtggctctgctggggagcaatggatttatcaagatcaaagttttcctgggagttattgatgcttaatttggaaatagacacactgttgatccctggtatctttagcaacaaagttaaaatgtttgtttttcttcactggttgccatctgagatcttgccggaagtacacaagagaaccttaaatttaacaggaggccctgggagcccatgaggctggcgggcttgggtctgaaatcttttcagtctcttgtaagtgatgagctctcattctctcctgagagctctacggtgccatgttttccactggccttttctgctcagtaattgctacattacaggctgttggtaagttcggaacaagggagctgctgattccatttctgtagcagagaacatgcaccgtgagacttgttgtaccagttcaggttttaggtgctctatttattcttgccccattcagaatgctctcccctgggtctgtggccacaatgctaagagtcatatttatgggcctgcagttgtaattgggccccattctgttcccccaagtggaaagatgaacagggtgtaagcaaccttccctgtagttagaaaaacgtttagttggatttatcagtctgatttttcactcataaacaattgcacaagcctttgcaagcccagagggtcttgtaataatgatggccgtggtccattatggcacagtgatgtgttctacggtggtcattttgctggcaatgacagtcacctctgaacttctctttccaacagacacaatttctcggggtttactttgtctcatcccaagagttccttgccaatgcctacgtcttagctgtgcttctgttccttgccctcctactgcaaaggacatttctgcaagcatcctactatgtggccattgaaactggaattaacttgagaggagcaatacaggtacttggatgattattttttcactttgccataagaaccattattaggaataatgtccatgagtgttattcatcctcatggacactcaagaataattctgctgtaaatttattttttgttgcccattaacgatgttttaaaacagtaaccattgacaaggcagtgtgggatagtggaaaatatcttgggctgaacttgggagacagtgtagctctggctctggttctgccttggactgggtctgaaaatccagctgctcagcccttggcttgaaagtggtagacgtcactaattgatcacagcactctttctgaccaagggtaaatgcaaccttggaatcctctctaagtggctgttccagagttctgctaccagacagtcttctttgggtgtgaaaaaaggaatgtgcttgacatacaaggtctagatagcctctaagacagggtcccctctaagatggggtattggtccatggcctgttaggaactgagccacacatcaggaggtaagcagtgggagcaagcattactacctgagctctgcctcctgtcagatcagcggctacattagactctcataggagtgcgaaccctattgtgaactgtgcaggcaagggtctaggttgtgtgttccttatgagaatctaatgcctgatgatctgaagtggaacagtttcatcctgaaaccatccctctcccccaggtccatggaaaaattgtcttccacgaaaccagtccctggtgccaaaaaggttgaggaccactgctctaagttctatttgaacccttaagtcttgctcactaatgagagtgacctatttggtctgttgggtcacttaagtctaggctcttggtcctgccttctgtgatttccttcttagagtttctggaaagatgatcaaagccagggagtgttcagggcccctctgaagaaggtgatgatgagagttgtccaagtcccagggtcttcactaggattttggttcagctatcagactagagagacatcctgattgagagtagtttaaatgggatagaagtttgtttattcttcagatagagtcagggctgacacaggagctactcaatgatcagagacctggcttcttctgtcatgttgctctgccagccttcttttgtgacttttgtctccatagccatggtgggtattgaaactgccactatatttacatttaaactagccagaagaagggacaagaggagggaacgcattttccttttaaaatggtaatacctgatttgcacataccctctcgcatcccattggtgagaaagtggccaaatggccgtatctagagagtctagaaagagcttggtctttattcttgacagctatatatgcactgctagaaattctctgtgcaaagaggagaatgggcattgggaataactagatgcagctatgcctagtgatgtccatgaagttgtggtaaaatcctgaagctaccttgttctttggaaatgttcctcagaatcattaacattagtcatgtgggagacaggagaagaagctctgcagaaaagggaccgagaggacaaggatatagcttgggctggggacaatgtcagagtccaaactctggctatcttggaatagtctgtgtgaacggtgccctcccaagttgtgcagtgcacaacctgtgcagctatatatggcaaccctgcccatccccagtggtttctcactgggaaagcagagtatttcctcagggatgtcattatgtgacaatagtggaaaaagcccaggaaaatctaagaccttctaagactcatgggggcccagagctgggaggaaccaagctgttgctcagttcagaaaacttctctagaaatcccagcctctcctcacacccctccagtgacaggcagacttgcaccaccacaagcaacagccacttttgtggttgggcagttttgtaattaaatatactaatgtgtgtatgtcataaattacattttccaattatgccaaaagagccaaaaatggttttttaatggttagcatataatcgtttttatcaaattgcttgaatctttcatgttaataagagagattcattactatgccacaaaaagcaaatactggcattaattatagaaacaaattaggggggtggagcgcaatggctcatgactgtaatcccagcgctttgggaggctgaggcgggtggatcacaaggtcagaagtttgagaccagcctgaccaacatagtgaaaccccatctctactaaaaatacaaaaattagccaggcatgttggcgtgcacctgtagtcccagctactcaggaggctgaggcaggagaatcgcttgaacccagcaggtggaggttgcagtgagctgagatcgtgccactatactccagcttgggcgacagagtgagacttcatctcaaaaaaaaaaaaaaaaaaaaagtggctcatgcctgtaatcccagcactttgggaggccaaggcgggtggatcacaaggtcaggagatcgagaccatcctggctaacatggtgaaaccccgtctctactaaaaatacaaaaaaaaattagccaggcatggtggcgggtgcctgtagtcccagctactcgggaggctgaggcaggagaatggcgtgaacccaggaggaggagcttgcagtgagccgagatggcaccaccgcactccagcctgggcgacacagcaagactctgaaaaaaaaaaaaaggaaagaaagaaggaaaggaaaggaaagaaaggaaaggaaaggaaggaaagaaagaaagaaaggaaagagagagagagaaagaaagaaagaaagaaagaaagaaagaaagaaagaaagaaagaaagaaagaaagaaagaaagagaaagaaagaaagaaaaagaaaagaaaggagttagggagaaaaaaaccctttctttctttcttttggagatttccggaaaatgtacccttacggatgagagcctgtgtcttcatgggttagagaataaccacgctttgtgcataaaaagttattaagcacaattcctgaattatacataattactagctgtcagtcagttgtgcatttctgtgtatgctggtcttcacttaataagactttatttcacagatcacttggtgtccctacttcactgaaactaggtgattatcttttgaagtctcatttcacataacctaggaggtatatagatttctttaaaaatgtcattgccattattttaaaccttacccatggtatatataaacttacagaaagacagaataggttcattattttaaaccttgcccatggtgtatattagctcacagaaagacatagaataggttcctgccttaagaaaacctgacccacaaaaaagcctgggtttacacaaaagaggaattaagggcggggagcccaccttacaacagaatgaataatagaattttatccaagagcaggcatcctgaggacatttaagacccggatgcatttttccttgttcaagagcacacatccaaaaattgcagtctttctgcgagtcatgatcactctgcacataaagcgtttaggttcagagctcggggaggccattaccatggctgctctctgtctgccctgtgagggtccttggggtggctgcactctggggatggtgctggggctgactgactcacgcggtcgtgtaacacatcagaccttccaaagtcgaacccttgttttgtttcaaggctcaattatgacaggacttggtctcagagcagatcccctccctaggctggagaaggccactttaaaacagatggcctgccccacttcatcatttttatggctctgatctgtgttctccactggcctctggtaaatcaagaatacaagtggacatgaagatctgctttaaaaaataaagaacagaccgggtgcggtggctcatgcctgtaatctcagcatttggaggccgaggtggatggatctcctgaggtcaggagtttgagaccagcctggccaacatggcaaaaccccatctctgctaaaaatataaaaattagctgggcatggtaggcacgtgcctataattccagctactccggaggctgaggcatgagaattgcttgaacccggaaggtggaggctgcagtgagctgagatcatgccacttcactccagcctgggaagcagagcgagactctgtctctaaataaataagtaaatgaattaaattaaataaaaataaagaaccaattaagtcctgtctacaggaaaaggccttacttgctggagaagtagcttgctgtgctggagtagactagtaagttggaacggtgatacagtaccaccttacagagctgctctagggcaccatggggactgtctgagaagcccctggcacactgtaacaggtggcatctggtgtggtgatgatgatgagaatgatgatgaatgtgaaacactctgctctcatttctagaccaagatttacaataaaattatgcacctgtccacctccaacctgtccatgggagaaatgactgctggacagatctgtaatctggttgccatcgacaccaatcagctcatgtggtttttcttcttgtgcccaaacctctgggctatgccagtacaggtactagatgggctgaggggaagggaggggggcagcaggacacacaaccagaatctgctggtccatggccagtaactaggagcacaccgtcttccactccatgcttgcctgtacctttcacacacttggctataccacaggctgtacctctgggtccctcctgtcccatactctgcaagcactgaccatctctcttaatgaccagagaaggcagtatcattaagactttaaaaatggagccaactttataaactatagaaaaatcaagccaggttcaggggctcacacctgtaatcccagcactttgggaggctgaggcaggaagattacatgagcacaggagttcaagactggcctgggcaacacagtgagaccccttctatgcagaaaaaaaaaagaagaaagaaaagaaaaatcgtacatggaatgcccacagatcttaaaagctatgttgtagcaaaatatttaattacatcaaaaagtgttagtgatgtatttttaagcaaaaagagtaagttacaaatagtatatgttgtatgcttactactaaactggaatatatgttatgtatacatttgtacagattcacacatgaaaaagaattggaaaatcacatagtgggattataagtgatttttattttctttatgtgtttctaaattctctaataagcgtgtataagatttggaaatcaacaacatgatacttttagcctaggcaacaaagtgagaccctgtctgtacaaaaaattagctggaagtggtggctcacaactatagccccagctactcagaggctgaggtgggaagattacctaaagtccaggaggcagaggttgcagtgagctacaatcacaccactgcactccagcctgggcgatagagtgacaccttgtctcaaaaacaaacaaaacctggtgttttttagccagatgtggtggtgcgcccctttagtcccagctacctgggagtctgagatggaaggattgcttgaccccaggagttcaaggctgcagtgagcaatgatcacgcccctgcacttcagcctggacaacagagagactcctgtctcttaaaaaataaaaataaaaacgttaaaacatggtatttttttaaagcaagacaacctttggtgctggctcaggaagaggtacattaccccccaataatcagaggagaatcgtcagcatgattgatctgacctcgggcttcatgtgtcccatctcccacccggagctcttccaccacagagtctgatcctgtcctatgcctgggactaaatcttcaccctggtgttcaggccagaaaccgaaatcccagacccattcccagagggcgggaaggttccaccgggagagcttgatgtagcagaaagtgacttgggtgagacaggctgattcaaatacttaacctctctgagccttggtttctttatctatgaaatggggaggctgcccaccctctggagttgctatggcaattcagttagataatgtaagtaacacagcaggcagagtggcccccagagtcttcacttcgtaaatatcagatccctctaccttgcacatgtttggtatgagtgaggtgttaccaatccagaatccattgcttcttgggataaagattccataaaccttcatctccagtgatttgtattggtcctccttacttgtaaagcttagagtttaaaaatattaaaagaaaaaaaggggagaggctcccacagggacacagctagacaagatgagatgcagggaatctgatgttcttttttatgggaacagtcatatatgccatcccccattaccacctacccatgcccagactgcccccgctccattctgccaagacagatcaatgactataaaagctacaaaagggcctggagatctcatctagtttagttaccaaccaaccttttatgcacaagactttctaagctgggtgtggtggctcatgcctgtagtctcagccactcaaaaggctgaggtaggaggatggcttgagcccaagagttcgagtccagcctgggcaacatagagagacctcatctctaacacaattttttttttgaaacatgaaaaatgaagatttctgaccatgcttctctcattagttaacactttgggctgtgagggtctgatgcagagagacacagcctgggaggatcctaacatgtacacagcattcaaaaggctacaagacactttctgttgtgtccccttgaacaagcagtttgtaagattttgttggccaggcatggtggctcgctcctgtaatcccagcactttgggaggctgaggctgatggttcacctgaggtcaggagttcgagaccagcctgaccaatatggtgaaaccccgtctctactaaaaatacaaaaattagccgggcatgatggcgtgtgcctgtagtctcagctactccggaggctgagacaggagaattgcttgagcccaggaggcggagactgtggtgagctgagatcgtgtcactgcgttccagcctgggtaacagagcgagactcggtctaaaaaaaaaaaaaaaaaagaaatcaggttttgtctactaaacctgctgcacggttaccgttactagtactcacagggtttgttgcacatgcatcgttgctaatagtgctaactaatattaacagcccttgccctatgcctggccctgtcccagcccccctcccttgtataatttaacccttgcactgggggtagagattttcatatctactgatttcttacctttgctcatttatcatggagtgtcctttggttttctgtgtttgtatatacctttaccacttatagatttgaccagcactcaagaaccagtgttactcctgggagttaatacaatcccagccccatggcaaagaaactcatgtggttaggattctgtgtgcagcctggttagccacagggcacgtaaggctttttataatattgacatgagtgcagaagccccattcccgtgtaagccctgagggctcttgtttcataatctttttttggtcacatgcacacagctttattgagatataacccactcatttaaagcatacaaatcagtgggttttagtgtcctatattcacagagctgtgcagccatcatcacaaatgtggaagttttcatttccccaaaaagaaacccgtacccattggcagtcactcctcatcttcgcccccagcccttggccaccgtttatctacacatacttttgaaaggctagtgaaactttctcagaaaaataaatgcttgctcaaacatttgggctataatttcaggggcttcatgggtgcccccctgacatttatcaagaacaccaggttaaggaatttagctataatggaggcctctgtgtttcccagtctcctgggtatcagaggcccagagagggcaggtgccttaccctgggccacgcagtgaaccagtggcagcaccatactcacacatctcctttctgcggttccccagtgacagagttctcaggaagctttttcatttattttctgagaggagggtaggccatcttgtattgatctccaactatatgccagccacaattctaggtgcttatcataaaggttcatttaatcttcacaatagtcctgcagagtggacagagtccttcagagtgggcattataatcaccattttaaagatggagaagctgaaaaccagagaggttaagtaactcacccaagactgcacagcaaaaggctggggctttgaaactcagggccacagactccaaagactatgtcctccccactatgctagatttttttcctaacctgtgaataggagacaaaatagtccttttatttctcacagttgctttgcacactcagaatccatgatttcttctgcatgagggccattcagacctgtgcagaagagagtaatggaccaaggagtcttgggagcacctaggaggaggggatgggggagcatgaggaggagccagggaacagcagcagctgcagcaccagctcccaccccagcctctgccagtctcttggaggtggtgtgggtgcagacaccggctcacaaggtgccctgttagtgagcttggggtgccatgggagccttcttgttgtcaggcccaacccaagctggctgaagaacaccctgatggcctccatttgagcacaactaatgaaggactggatgccagagataagtccaggagggtgatgctgcagggcaggccagggaagagggtacttcatctctatcatggtcctctgcccatccatgccagcatctaacacctgttaaacactgggaggcaggtggtgaaggggccacttcccagcctctaagatacctcctaagccaggaggcattctgtgattaaattacagggcctcccacttactcctttatccttgaggcggtgctggaagcttaatgccaatctggtgtagggctctgggactacaggaccaaggcaagcagtcctttctctctctctctctctttttagctaaggaagccagcacatctgttctttgagaaaaagccctgtatttagaggtgtctgcctttgaaggcaacctgagaaactgtcatcttggcgctttggggactggccatttacacttctcataaatattcagaagtaggcagtcatttacataaagctaaatgcagaaggaattctcttttcagggaatacctggcagattcattaaaaaaattaaagaaaccaagagcataagaatgaaaagcgaattctcggaccccaggctggttttttctggcatgggtgcagtaactttgcctctttgctcagttatcacttttttccaatgacagtaaccataagccctgagagccagcaaatagaacaaaaggtgctgtcacaaacattgtgcaatctcatctctgagatttccatctggaaaatagactggagagagttaaggcttcaaccagccttgcagataaatgcagttagttaccagcccagcaaccctctgcttgcatgagagcccattatgctaacctccttttgaaattgctttgtttctcctccttccctgcactccactccccaagataatttggaaacctgggcaccaaggcttgtcccactctaggggactggggaaacagggattttgccagcacctcctggcagggcaaccatcaggtcaaagggacctgacccatgaccccttcctcagatcattgtgggtgtgattctcctctactacatactcggagtcagtgccttaattggagcagctgtcatcattctactggctcctgtccagtacttcgtggccaccaagctgtctcaggcccagcggagcacactggtgagtgcccaaaggtgtgtgtgttttgtccctcttcccctccttccctcgacagcagcaggtctcctcccacacacccacactgtcattgactttgactttgactttgagtaggccacttcacctgtccaggcctcagcttctttgtctgggaaatggagtcaatgggggaggaggctgcctcccggtgaggacaggaggcgggcatggcagtgacagtattgacactcaggccttcctctcgggtgggagacggagcagaagcctctcccctctgactcggggacccctgcaggagtattccaatgagcggctgaagcagaccaacgagatgctccgcggcatcaagctgctgaagctgtacgcctgggagaacatcttccgcacgcgggtggagacgacccgcaggaaggagatgaccagcctcagggcctttgccatctatacctccatctccagtgagttcaccccacacagccagccctgggtgctgctgcgtacatgcaaggagagggtgtcagagctcgggtaagagggggtgcagggacagaagcaggaggccttgagattatccgactcagtaggggagcctcaaactggctctgatagctaagctcccagaaatcaaagtactcttcattcatttatccaacaaacatgcatggaaagcctgctatgtgctggacactgtgctggccctcaggatacagtgatgaggaagagagatgaagtttcattcctcatggaactgatatgttattgacagacagcagcaagtaagtaaatgaccacagttttgaactctcctaagaatgaagactttttagtaagtcagactgagctgtcattgccctggggaagctacaagaaagcttccatccacttggggctatgcaaaagaaaaagactagttatccttaaatatcagaagcccaggctgaaggtactcacaggtgtagggactgaatttatattaaccaagtagtttgggaaccccaagccaaggaagaagaaaaagaccaaaactggtaaaagtcctagagtcccatatacttgaaaccattttactgagaatgtaaaacttttttttctttttttgagatggagtctcgctctgtcacccaggctggagtgcagtggcaaaatctcggctcactgcaacctccacatcccaggttcaagtgattctcctgcctcagcctcccatgtagctgggactacaggcacacaccaccacacccgactaatttttgtatttttagtagagacagagtttcaccatattggccaggctagtcttgaactcctgacctcgtgatccacccgcctcagcctcccaaagtgctggaattacatgcatgagccactgtgcccagcccaaaagattttttagaaattgaaattttagttatggaaattaattcagtgaacaatggtcccctggtcagagtgagggcttacggaggtcaggtgatccatggagtcctggcccaagtttatctcacagttggtctcgtggctccgtggacccatcccatggtggttacttcccaagtgcataattgggatgtagatatttagcaaccagctgacttcacactagttccctgacctgtccagtctaagagtcattatggccaagtggaagcccctggaaagaagaaaacaaaaaagaaaccaaaacttactcagtgcacaggttacatgaatgagtatagctgaagagagaatttttgaattagaagacagatgagtggggattacacagaacgtggcaaggagagtaagttggtagaaccattttacagatgggaaattaaggccagaggggagtgtgttcctgagatccctcctgaggttagtagcatggctcggactagatcctccaaagtctcttaactcctggtctcaggctattttccacaaagagctgggggcctctgtggggtgaagaagacttaggacaccatggggcaccattatgaggccatttcctcctaggagaaaaaaaatctctgggctctgaaaggagtagaattagggtaggaaattaagagaggctaccgaccacctcctccaactaaaattggttcttttggtgccaggaagagacacacctggtgggggagggaaggtggtaatggagggggtgctggtagtgtctcccagatagacccatccaacaagtctcatggagaatgagacggtcactcaggtcatctgcgtattcttggcattcttgctgcctagagagagagtctgatggagctaggtggccaccaagctgtcccactccccaagacagtttggaaacatgggcaccaaggcatgtccctgtctaggggactggggaaatatcccatagcagtgttctcacagtatggggctggccatgaataccccaggagtccaacctccctttgtccagctagaccatggtgtcctatgcctcaggcagggaatgtggtccagtcatcagtggctgggccgtctgccatacatggtgcaagccatggcgttttatgcagaaagtcctgctagcatttgattttctcagaatggagctgtgagcatggcaggcaaccactgtttcctggattcttcaccaagacaccccaagttcctggtctctccccgttatcctcatccctgaccctgtggttctcagagcctccaaacacactcaggctaagcactccatagacaggggaaatttggaaggaacatctagggagctcagaaaagccaatgtccctagccccaggcccacttcaaccttctctctgtcagtcctgcctgcccctggaggctggttacatgaagagtaaccccctgcttgtgtatagccccccagttttgtacaggtttagagacagttcccagcagtaggaacagctgccgaggtgggagagggcttctcccgatagccgggggacttcctctcccaggaacaacagggtggggtagagcaggcttgtcgttgctgagatagagagagggaagggaaacaacaaggaaagtgggggcactgggtccccaaggttcctggcacagcaagcagtgaagttggggcagcctcaggtcatgtagtgggggcaggtgacatctgctttgactgctcctaagagatatgtactcatctcctggattccaaactgcagcctgggacatgttttcttatataaacagcatcaaaagatgtgtgagttcccaggctagcccactgaaccctacctagtgggtgctcattgtcccccagagcccccagaagacaagccgtggctttgtgatgggcctggggccaggaggacctagggatatgttgtgaagagctgagaagactctggaaaaaaggggctctggagccaagcaggagcccgcccaggactcctcacgtgtccaagtcacctagggagagaaacagagcagcccaggttggtccctggaagagagcagcggaggaggggaaaggggagagcccctggggagagctttgaaagtcaagtgctgtttgctcagtgtgtttgcctttccgaggatgtgtttttttttccctccgttagtcagcagtgggagggggagagagacgggtggtagggtgcagggtacctcctggctgcaggcatatgctttgagtgcgtgttcatttacctcctctggacttcctgccttctgttaccagggatcaagacacaggtcattaggcgtgaggtaatggggcatctcttgttctgacccctggcgccagtcttggagtcctgacgctgcagaggagccccagagtcacatttcctgttggggcccatcctgctcatatgcggcaccatcagacttctgggcaggcaagattacctgtgactctgtctgatggtctcgccatcaatatcactgagagtagctgtgtatggagtcccgaactggtacaggataaaacagggggctgaaaagggaatgaatgggcacagtttctctggcatcaaaagtcacatccagaattgatatttcctgttgagtaaaaatagaaatataagttgctcagtggatgttgagtgagccctattcatgtgccccactctgtgccaagcaccaggaaggagggaagggaaaaatgataagatgttctccccgttctccaggagtttatgctccactaagaagtcagagctaacatgcacagaacagtgtggcagcgagagcagaaccgtgtggccagctccatgcttgccgcctagcaagcgtgattgcacttcatcctcataacaacttggtgaggtgtgttgctctgttgtcccattttacagcagagaggactgactctcagtgaattgaaatgtctcagtgaggtcttccacagcaaaaggcgaagcacagagaaggaagtccatgtgggctgggagttcacccagagattcatgtaggggcaatgtgggctgtaccttgcaagatggtgggatttcaatgaggagaagacaaagtgggaggaagctggagacaaggactgtggtctcttcctttagaagtcagttcaatctttttttccttgtggaagcagcataactctaggtggttcctctgtatctgaggacaagctttgtagaggtgacaaaggggtcctaggtcctatcaggcaagcactcgatatgctgccagttcattctgtccattgtgagatacccattccagagcgcttcctctgtgccaggctctacggaggttctggatgttaaagaggaagcaggcatggccctggccctcccagtcttgtgggagattgatcatgcccatgaatagtgaccatgtggtcagagccacagggtcaattccaaatgcccctgtttctcttttgtgttactcacctgactctgggtctttcgtttcttccattcattttttttaaacaaatatttcctgcccaccttctgtgtgccaggcctggggatgcagtgggagaagcctctgtcctcctcagtggaggcgctaactcagaacaggcagtggagaaaaacaacatgacctggagacctggtgccccttccttccccagcatctttgaaattcttttggttgttgttgttttgagatggagtctcactctgttgtcaggctggagtgcagtggcgcgatctcaactcactgcaacctctgcctcccaggttcaagtaattctccctgcctcagcctcccaagtagctgggattacaggtgctctctaccatgcccagtaatattttttgtatttttagtagagacagggtttcgccatgttggccagcctggtctcaaactcctgacctcaggtgatccacctgccttggcctcccaaaatgctgggattacaagcatgagccactgtgcctggcctgaaattcttcaatatctacctgcccttctgccagttggtgcagccacagtgggctgcttatgcatatcctggcctggcttggtggggagcatggctgagggagagccggggcacccatcaattaaggaggtaaagatcagtctgactgagatgcctcctgccacacttcctcagctgccagcaactgacaccattaacctgatttccttccccctctgttgactgcactgactattggactgaatgggaaacagccccgtgcacctcaaaatgcacttcccctcctgcagatgcatcttgcaattaggcccaaactgtgagcctgcatgctcctcccctggccctgcacaggcaacaaagctgaagttaatcagaggtacaaatggctggctatgcctctctgacacgtaacttctggaacatgtatcaatgctttggaaatgaaaagctcctggtattgcaatgccaggctggtgcccataagggccagaaaacattccttgggcaaagccagggggagtgggtgatctgatcccagctcaggtttgttgatttgttgttttgtttgtttcgttttgtatggggcaagggttgagggtatgaaaaacttacactatcatttactaccgtagtccccagaacccagcacaccagcacaaggcctggaacagggataccttttttgaatgaataagtctttttttttttttttttttttttttttgagacagagtttcactcttgttgcccaggctggagtgcagtggcgcgatctcggctcactgcaacctccgcctcctgggttcaagcgattctcctgcctcagcctctcgagtagctaggattacaggtatgcgccaccacgcctggctaatattttggtatttttagtagagatggggtttcaccatgttggccaggctggtctcaaactcctgacctcaggtgatccacccaccttggcctcccagagtgctgggattacaggcgtgagccactgtgcccagccttgaatggataagtcttaagggatatttttggaaaggatattctaaaaaatacccatgtctctacactattgcagaagggctttcagttttgatggcagcctttcaggccagcctacacgcaactaaacttttccataacagcatcacacttacacaagaagaaggttttataatccacttgccattatttaacatagttcttcctccttaactttcaagatctgagcactataatgttcttctttttgtttttgtttttttctaaatcaaattaaggtgagtcacctcaccttgggcctgagttggacagaaatctattcttggctatattccccacccctccaccaccttggaaccttatagaactttatgtggttcaggaaaatgagggcgaggcctcagatcttcaacccatgacagctgtatgcccagctccctgccttcctgtcttacccccagctagggcacaggactgactattgtgcccagagaggtgccagagcctgtaacaaccccagacttcccaggtccagccacatccaccccagagccccaaaagatgatcttcagagagacctttaaaacacaagtagctggtcacttccatccagaccagaacccaagatggctgtgctcttgctgagacatgttggttgtcattgcctccgagcccactttagccctcagctctgtaccagaaatgctgttcctttgggaatcacagccaaagaagagatggagcagttctggaataagaacacaagttcaaactgtcccatatctccccacatcactatctacagttggtctcttcccatggcgatgtccatctgccaccgtggcactggtattgctttgagtgcaggggtctctctttttggcatgttggccctgttactccctgggaactttgagtcttatttggaatgcgtgaagtccctgtgtccggggccagcactgatccacacagctaagtttgcactcatcttccctctcatgtatcatatctggaatggggtctgacacttgatgtgggacctaggaaaaggcctgaagattccccagctataccaatctggagtggttgtcccggttcttactgtactgtcctctgtagggctggcagccatgtgaagaacagaggttcccagcatcatcttcctacacattattacattcacccatctttctgtttctcacttttatctccagcctgggaaaagttctccttatttgtttaaatccttttgtgcttttagatccccttggagcagtagagtaccttgtagaccataagagtggaaaagggtctagttttctccttgtttctaaagatggggtggctgaaaaaactccccttttttgcctacagcttgcctctctgggcctagaagtggttattctgtctccatattggcctttgatttgtgctgagggtcagcttttggctccttcttcctgagacagtggaaacaatgccagctgtgtggcttctgccctgggggctgggggtgaggctttgggtgccactgcctgtgggttgctggcttaaaggacaattctgttcattggtgagagcccaggccattaacacctacgcagtgttattgaaagaagagaggcgggggtggaggggaattagtctatcccagctagagggagataaagagggctagttagttcttggagcagctgctttgaggagaaaatgtatagcttttgacacaacaggaagatccagaaaattatcattgaacatattaaaggttatttctttttcttgcaaaacacacacacacacacacacacacacacacacacgcgaacacacgcagctgatgattctactctcccagccccagccctgaaggggacccagaactccctgcacaaaggctgtccttcaaggggagggtgaaagaagtggaaaatcacattttcattctttagcgtctccatacaacagccagaactgggcagaagctaattatatcagaagcatactccatgttgctgcatcagctttgggatgttcatttttaaatttatttatagcttgtctcattcctcaaaggagttcagggagctacaaaaataaagacaataaaattgaaaaaaattaaattaaaaaaaccatgaccagggaaaatgtgcagtagaatgaagtgtcaattatcacgttttctgactgcaaaatctcccccacggctgatgcaccatcatttactacaacagcccctcttgttggacatttccagtttatttcgtttgggatggtttgttgctgttgctgtggttgtggttttgttttattgaattttgtgttagctgcagctaataccatcttgctgatggctttgcgctgctcttgaatgattactcaggataaatttcctggagacggattataggatcagaaggtctgaacttctgtgtggctctagctacaaagcaccagattgctttccaagagcgttgtagcaatttataatccaacactcagcctattttttggctgggagtcaagccccagaatgtgaaggaggggtcttggcctggagcaggggctgagggatgggtgcacaggacccctccttattggttatttatggggatgggccaggaggagcagaatagaggcccctgccctcccagttgctccttggagtgactgaccccataggggaggggcgaggctacctcacatttagaactatgtagttggtgatggtcaaggtcctaggtctgatgggcatcctcctccctctcctcctcagccagtaatggctgcactatgtcgtatgtcctagatctgggtcccttttgctgtgggaacaccaataatacttacgctgtttcctgccggaaacggtgcaggagggctgtggcatggtagtgggccctggaaaccatctagccttcatgaggaagggcagttaaagcacaggcatgtatgatgttggtattgattaaaagcctcacgggcagagaaattcgccatctgccagggccccagccatacgagggctccagccatacatcctccaggagactgggacctctccaattgcaggagccttgccttccccatcagattaggaattccccgaggatggggacaatgtccttcccacctgcttgagaactcctaaggggcatgtactctgtctccccattgtatctggaacttcctgggagcatagctcctgtctccgtcctcagactgggaatcccctaagggcagaggccatgtccttccacccacttgggattccctgaagttggggaccacatctctgatgtacaatgctttgtatgtactgactgctgcaggattcttggagtaaatgggcagtcaacttcttggactggtattgaccatctggacttcatcagagtgtccaagactttgccattcattagacaggggccatgtgcacaggcagagccctggcctctggcttctggctcctgactcctggtccctctgctttaatttggctaatggcagaaccagactcctttctgggctgccctggaaggggatccttgaatgaaagaggatagatgggaaggtggcagctgacatggttacctcttatgccatgggggggctgctctctctggaaatttaggcctggggtcagggcactgttgagcattttacaccctaggccagaggaggggtgacctgtggagcagggctaagctagtagcccatgaggtatgatgtgtaggcagcacctggggctcacagagcctgttacccatgttatctcctctgaccttggaaagagctggggtgtatgaacaagtatttataagtttacaaaaatcatatgaggaaactgaggcacggggaaggtaaatgacatgccctaggttacacagcttataagtagcagggattctgcccttctgtcacaccaagtcccactgtcttttcttcctggagtccctgtgactgatctaaaggccacatgtttaacagaataaggaggaggcctctgttgcagcaaaccagctaccccacccgcacacagactctaagggacatcctgctttaagctgtccttagttactaatacctcagtgagaatgagtttgaaattttctcaagagccatgggagactaggaagtctctaagcttcatagagagcctggcttggggggacacaggagccaaaggcagaggaagaagtggcagctttgtgcccccagaaacacgtgctcctgacctcacagttggccacagccagccaactctcccatccttctcccaccactttcccgtggggctaacttcaccctgtccacacggagtgacttaacagtttaagccccagagtcgggggccggggtacctgggacaagagtcctgagggaaatggggtgaggaactggaagtgccacagggctagagttctgcccctagcctactggagctgtgccccacaggctggccccactggactgcgctgcctccaagccatcctgggcatctccatgtgtagctgtcacgctcctcccactaaacgcctccctgtgcttcctctgcagttttcatgaacacggccatccccattgcagctgtcctcatagtaagtggatcctttctccatctcttgggggtagggtggagggggagggcgtctgcagtgacaggctgcccagatttggcctttctgcacaggggcctcagaagacaggctccacagccagactgaaaataggatcgaaagtttatagagggtgtggcccctccccaactccagccgaacaggggcctctgcctccaggcctggaagaccggaggcttagtatttagagaaattaaactttcttttaaaaaatagctatccaaatttttaatttttaaagtgaaacatgtgtattgtagaagtgatgggaaatccagaacagaaagctcaaagagaattaaaatcacccataatcccactggtaacatttttaatgtgtttctttccagtctttttttaaggcctatgatatgtcattttctacaaaaataggaatgtgctatgcatgcagttttgcaacctgctcttttaaatttaggaatatgccacacacaattctccatgccactgaatattatgatggtggctttctaaagcaattttgataaaagctgtgtgtgagctgagccatgggggtcaagcagcatgctcctacagaaaggcctgggcccctacgagcctgcagccccctcacccagcctcccatccccatcttctgtgatggctgcagttccttaaaaagatctgcttatttcccccggggccagtgtccctgagctgtgtagagttcacagcctgtcggatacacttgggaattcacttccaatgtgatgtattgagctggttcctggcctggctcctgggggaactgtgggtaacagaggccactgagccagccaggtggctggggcaaagcactgtgcagtttcgtaatcactctgtttacgttatcccgatgaggactggggagatgagcaccccgcctgctgtctgcagagggggccgtgctgacctaacccgagatctcctccctgcttattcccagccaagactgggcaggacagggagtcttggccaggacagggagggagcagcccctgctctccagcttgaagtcctgaacttgttggggacgtttccatgagatgactgtggggatgatgaaggtgtctccaactaaaagatcctcttaggagcctgctccctgacagccctctcatttcccttccagtgctgagcgtttccagtgtgggagggacccacaccctgggccaccctggcctcacttgtgcctctgtccacagactttcgtgggccacgtcagcttcttcaaagaggccgacttctcgccctccgtggcctttgcctccctctccctcttccatatcttggtcacaccgctgttcctgctgtccagtgtggtccgatctaccgtcaaagctctagtgaggtgaggggagggtccgggcgagggcactgggcaggcaggtcctgtgtcagcctcaaggcttgctcgagtgatggccaaaccacagctgtttggtcccggaacacacccccattgctgggccttgctgtagctggtcctggttggtcagagggacattggcctgtatggtttcccagctcgccatccctgagcaaggacttgcttacatacctcccaggagaggggactcactgtcactttcacgacaacttaaaaaaaaaaaaaaaccagtgttgagccaaatgtggaatcctcctaaattctacccactggtcctaacttcaccctccagagccaccaagaatgaggccatcccgtccccacgtggctgccccatggatatcagaaggcatccactgtgtctatctttcccaggccaagtatcccctaccctttccacagcccctgagccctcacagcctcagccagtgaaacagcttcccccaagcgctgggtcctgctctgattggcccacagctcttggaggctcccacttccaggctctagagcctcatggggactctgccactgtcccagaggcattgccctcttgggaatgaaagcctgaaggtagaaggctgaggctttggctgggaaatgccctgtctggagtgagaagatgtccttgggcctctgaagtagctctgcctccttgaaagcaagagcctgtcatgcctctatggagggctggcttgtccttacccatggccagagaaccagtcagtaacaaatgtcctctgtgtcttcagccttgaggaaggtgacacccctgtctcatgggaccctggcaggtactgggaagctggaaggaaggagtagctgttggaatgaagtagctgatagagagggtagcttgcagggggagactctagcatgggttcaaagatggaatggggcataactcagcaaaattatgctctaaggagtatctgaccaggcagtagctggttaaacagggattagctcccatttccacagtcggctgtgctgactcagtttcttgaccagggtgttgtggggtctgaagatcacccctcctcccaccacccactctccagccctatgattctgtgtagaaaccacagatttaagaacgctgcacctgcctgaaaactgttgcactgatcccaaagcgttcatattttcaaacactctggatcccactgtttccaggaatggaacaccagagtagcagaggccttttcagtgaggcagctcaggctctggctgaaggtgggcgcaggacactacctgaagcttcaccccaagagatgagggccagctccactcttcccagtcaccgcctgtgggggagggaggctggacagggcatgaaggcagagcctggtggtctgcccctcccatctaggggtggcgcacagaaagggagactccaggccacagctcacttacaccccagaataaccttgccttgagggtgggatggcttgtctgccccaggcctgttggacatttagcaaaagagaagaaaggggaatacaaacaatcctgagcttcccagaaagctttcacacctccaggatgggagagaatgaactagaagagtgaagcttccagtgcttcctcaggtccacagggaaatctggacaggggagagggtaggaatagccgcctcccccgtgagtaatgacacctcctccagcaggctgttatggggatccgattacataatgctacaaaacagttaacacagtgtctggcatttagtgtatgctcacaaaatactagctattgattctttaccaatcctagtcctaactaaccttaaccctgaccaatccaacaccaaccatccttcagtctaataacccagactaactaacttcaacattaaccctaaaactaaccaatctcacctccaatccagaccccagcctattccagctgactggtcaaccctagcaaaccctggtaacaccaattacctgcccccatgcccactggtctgcccccttcagtgtgggctttgtgggactatacttcaggcctgagatcctgctcagagctctctatcaggctgcgccctctcccctcccctctgcccctggcaggggtgaggggtgtctctgtgcttcccgagcagcgtgcaaaagctaagcgagttcctgtccagtgcagagatccgtgaggagcagtgtgccccccatgagcccacacctcagggcccagccagcaagtaccaggcggtggtgagtgcccggcctccccttgctactcccagcatggtcctctaaggcccaaaacttgggcctgctgtgtcggacttctgccttttttcccaggaagaggggctcccttccctacacagctcccagcccagtgggtcctcacctccaaaccacccccagcccctcagggttgtgaaccgcaagcgtccagcccgggaggattgtcggggcctcaccggcccactgcagagcctggtccccagtgcagatggcgatgctgacaactgctgtgtccaggtgagtcctgctgccccatgcctggccacccagcaccaactcccagagggagctcagcacctggaaagccagaaagctgcatgcttagtcctctgcagaggtcaccctgcctgcctgtacggtccataggagtccagaaaccagggaccaccaagtggggggacccccagccttaggcaagggtcagcatgagaaggccagtctcccactcccctgctctggaagtgatccaggggctggaatcagtgtcttttggctttcatggaggaggggaagccagagactattcactgggaactggctgcctttctgttctctcctgggcggtgggacacgcctaatgaagatcatgggaggctacttcacgtggaccccagatggaatccccacactgtccaacatcaccattcgtatcccccgaggtatggcccagtccacccctccagcatgcccctccccatgtcccactgaataacatagagataaaaagacaaagctgcatttattgagcacctactctctgctcattcttggtgtatgccctgggtatattatagaaggggaaggctacattctagaggcttccgtgtgctgggtgggagtgaagcactaaggacagggtaaaattgccagccttaatgtcaaaccatccattgcagacagtataggtaatgcacaaaaagatcagaagtgggtagccaaggaacgcaagtggaagtgatggggtttctgagaatggacaaaggccctgaggccatgaggcaggaggattttctggcagaggcagccatgagcaaagtatggaggtgggttggaggtgggacccaggatggtgtttcttgggaccacaaggagcctgggctcatactaggagcatgggaaaggagaagcgagtgcttaggaagggtggcggggcaggaaatcagagagggggaaggacctggggagccagaggaggatgttgatttccagaaggaaaggattaaagagggagaggacttgctggggattctaggtaggaagaaagaaaacaggggccccagggttgggtgcatctgtctgtctgtctttctgggtaatggttgttcagactcccccggccccactcacatctgccaccctccctccctgcaggccagctgactatgatcgtggggcaggtgggctgcggcaagtcctcgctccttctagccgcactgggggagatgcagaaggtctcaggggctgtcttctggagcaggtaatacatgtatcctcagggcccagtggaggggaaatctccttttaaccatcctcctcagttgaggatgcacacacatttattggagggcccactctgtgttcagtgaggactcaataaatgctgctaatggatattctcatcatcatcactagtacgtattcacctcttactatgcgcaggttctttgctaagtcctttgcatgcattatttcatttaatttttatgataactaacaaggtccatactgttctcaattctcatttatagaggaaggttaaactatttgtcctaattcacacagctaataagtggcagagctggaattgaaactcagttctgtcagactctgaatcccatggttactcagatgcacggcagtaatttcccagtgtgggaaattgcaacaccaacattggtttccagcttggtcctgagctgcactgacctacacaccataagtgggtgttctgaagatccagatgtaaccaataaatgttggtttctgggcaaagatcactgtcttaattaaagagccagaaccccaggctcagtcaatcacgaatctgttatttatacccacctacttccaagaagcacttgaaactagttgatgaaagattcatgtaaaaatcaaaaccacaatgagataccatctcacacccgttagaatggtgatcgttaaaaagtcaggaaacaacaaatgctggagaggatgtggagaaataggaacgcttttacactgttggtgggagtgtaaattagttcaaccattgtggaagacagtgcggtgattcctcaaggatctagaaccagaaataccatttgacccagcaattccattactgggtatatacccaaaggattataaatcattctactataaagacacatgcagacgtatgtttattgcagcactattcacaatagcaaagacttggaaacaacccaaatgcccatcaatgatagactggataaagaaaatgtggcacatatacaccatggaatactatgcagacataaaaaaggttgagttcgtgtcctttgcagggacatggatgaagctggaaactatcattctcagcaaactcacacaggaacagaaaagcaaataccacatgttctcactcataagtgggagttgaacaatgagaacacatggacacagggaggggaacatcacacactggggcctgtctgggggtggggggcaaggggagggatagcattaggagaaatacttaatgtagatgaagggttgatgggtgcagcaaaccaccatggcatgtgtatacctatgtaacaaacctgcacgttctgcacgtatatcccagaacttgaagtataataaaaaaagatgcatgtaaaataaaaccctttaaaaaggtaagaaaataggaactgagaaatgaagagggtaaaaagatgttcagcaacctgggcagaggacaactacagccatcaacataaaacctggctctgtgccctctggtagccaagggaaaaagggatctctgggctttggagtattcatttaggaataaaagttgcagccaatcagcagaagggcaagctttccctaccaatcatttctaggggaaaattattgaaggtgtcaggtttttcataagcatgagtacagaactgagcagggagaaagactttgggcccaatgtctgaatatcaacatgcacccccgtttcctgcatttccaagatgtccctgaatggtgtatccaaaagatggcaaatttccctcctcagtggggtcgtgggctagcagatgagccccttgggtttcccatcacctcccatcagggactgtgatgtctttgggggcagaggggtctttgcctccattcgccattttatttgggagatttttcaacatagcctgactgggaaggcccaggtattcggtttgagatcatattgccttattccgactgcctctccagcctttggagggaggagcccttttctgctgtccaactgcatgcctgcagcaagaagacaagagtccccagtgcactgtgagctgaagaaagtaaccaatatttattgggtacctcctatgggccatgccctttgctaagtgcattgtcaacatgatctcatcaagcctcctactaagtttaggaggggagtgttgttaccccatttcacagaagcagaaactcaggctcagagaagttgggtgacttactagtcagtgtgtggagcagagactctgcccatgttctttccctcaaacctggtcactgctggggcccccagggcctagtcctaagggttattgtccaagccccatgtagtggtcaggctggatctgggctctcctccaaggcagggcttttccagaaggattgcagggctcagacactggagctgcccctgccttgacctgctcagcatggatgtcaaaacccactctgaacctggtccctttgccctgctttcttctcctcccccaccctcatgccctcatgtggcatcgtgcctgcctcaggagctctccttgtcctatgtagatgaagcaggcatgattggcaggggtctgctctgccctgcctcagtccccacctcttctccaagctgtgccaaccctccgggtctgactgctgcccctctctcttaggaaacctctgccccagcccagggaacacaaggagcctctccaaggcagaggaccctaagcacttcttttttttattattttttattttattttaggttctgagatacatgtgcagagtgtgcaggtttgttacatagctatacatgtgccatggtgctttgctgcacctatcaacctgtcatctttttaagccccacatgtattaggtatttgtcctaatgctctccctcctcttgcctcccaccccccgacaggctcggtatgtgatgttcccctccctgtgtccacgtgttctcattgttcaactcccacttatagtgagcacatgtggtggttggttttctgttcctgcctaagcacttattataggccaggcactgtgcaggcacctcatcatctcagtcagtctgcaccgaactctgtgcagtagatattattatatcctcatttatcagattaggaaactgaggtgaagcaagttgtccaaggccacccagctgttaaatggcagaagtgggatttgcacctaggtgctcaagtgcattggtttgccaccatgtgctcaaagagaaggggcacaagagcctcatgaagaaggcatagctagcctgacagtccaaaggccagcagccgctgtggccatgactcacacacacctgcctcctcccagaactgccacgtgggtcctcacagctctgtccttatcaacacttactctcctttacaggtagcctaggccccagctcccagctctgttcgaggctcgcagaggggcggtagtgaaggggtctcatttctccaggatcctctttgctctctcgcccggtcctggtccagcttccctttcaagcatagtgaagtgcatttgttagcttgcagccaaccctgggaaatcatgagaatttgttcccaagtcaactcattctccagcgtccacagtgacgtattcactcacccagttgagcgcctagtgtatactagaccctgtgacagcaacaggagtgcaaaggtgactaagacgtggcccctgctttttttttttttttttttttttgagacggagtctcgccctgttgcccaggctggagtgcagtggtgcgatctcagctcctcacaagctctgcctcctaggttcaagcgattctcctgcttcagcctcccaagtagctgggactacaggtgtacaccaccatgccggctaattttttgtatttttagtagagacggggtttcactatgttggccagggtaatctcgaactcctgacctcatgatccgcccgcctcagcctcccaaagtgctgggattacaggcatgagccaccacccctggccggccccgcttttaagagaggggagagaagacctgggccttagaagagctcagaggaaccacaattgactctgcagtcaaggagaggaggctcactgcggatgtggtatttgagccttgaaggatgagtgtggtttcatcaagtagaaaaggcagggatgggaaagggaggtggtccaggcaggggtgatggtgtgggcaaagccttgctgatattaaagaacatagttctgtgcacctggaacactggatgcatggggtgcattatgaaagatgggactgaagaagtgaacttggcttagatcccatgtagtaggtctgagaagtaagatttaacccaaaggttgcaaaagaaccatgcttgtgataaaggatgatggattggggaaacagagaaaaagacagacagactgtaggaagggaggtattagcaaataatcataacacagtgtgaggtgtgcattaatattcactcattccaagtattgatcaagaagagaggtaggtactgggttaggaaacagcttgggcaaatgcatggggaaatgagagatgtcaagatgcattctaatggcagcctcttgaagatcttaagttgtttttggttcactcatttcgcaaatgaattcatttagcaaaagcactatggatacagtgcttacctctaggaagtaagttttagcccaaatgctgcagaaggatcatgcttatgacaaaggatgatggactggggagagagaaaaagaaaagacagacagactccaggaaggaaggtcagtctgcagctccttatagtggctaggagaaggagtctaggcagatacgactcaattagcttcatctgctgtttgtctctcaaaatctagacatgtgcactgctctggctggcccacctatcctgggcattgagttaagtgtgggggctgtgtgttgagagtccccctccattactggcaggaactccacacctcagacattgagccccaggtctgcagggagaagacgtgcttgcaaagtgagctaaaagcaaaacagcctctgacctggcaagcattcccaagtctgcacgcctgcagccagaggagagggtgatgccaggctgctgctcagatgcttttcagccatacccaggccaagacctggtgaccaggcagccagaaggagttccaggaggcacaaggcaggaagttgggggattaggaggtgtagaatggagaatgctctggggagatgggtgctttgttggtgcaactattcgtttattcctccagtgaccacgtgagcagtatggctgcacacacaggctctgcagccaagctgcctgggttcacatttggtctctgtgctttggaaaatttcataagctttctctaccagtttcccttattacccatgagattgatgtgaggattaacctagcatgtagtaaatatcctataaatattattattcaatagtgtacttctttgccaggaacaaaattcacctgttcctctttaaatgtcctccagtctgtctcctgggaaagattcttgtgagctccctggggacagggaccatattttgtttgtctcactgtatccgtagtgctttttgctaaacgaattcacttgctaaatgaatgaaccaggaacaacttaagaccttcaagaggctgccattataatgcatcttgacatctctctcctttccacatgcctttgtccgagctgtttcctaacccagtatttcactacccctcttctccatcaatatttggaatgagcaaataccgttagtgcatacctcacatggtattataattatttgctaatgcgtctgtctcctccatgactctgagctccttgagggattattccatgttgtaccccaggtgccccatgcagatgtgtattttgtgcactgttctgtgtaggctacaaaggaaaaggcctagcacctgcccttggggagctcacccacccaggatggacagaggtgtgcagacagagctgcagggtgggcacaaagggtccatctgctgaagtcctgcagatgcagccccgagcttgtccctcacgtcagcagcctggctcctggtctcagagagaactgtgtggttcccaagcattcactttaggaagaatcacttgcccctccctggctctctgcttcaaggaactgtgacaaccttgggatttgcaaactctctctttaatccttaagaggaaaatgttttggtaaaaagtcaagattagcagatacactcgggtgaaattctttccctggaaataaagaatagagccattaatatccacagtagagtgactttaaatgcccccggggggtcagcaggaaccagggccctgaggaaaggatcagcgtggggaagaggctcccacttccctgtgaggagctgcacatgcagtctcactggagctccctgctgcaatgctgttgcctgtggtggttggtgtggatgctgcctgccaagagccctgattccccaggaagagagaaaaaggcttctctcaggacggccctggtcgcatctgcctgtacaattcctggagcctttggggagctgaagtcaggggctcaagtgcccctgggtttcctggaggaggcaggtgtggtgagacagctgacagacaggagaagggatgctctgaggaagtgactgtccagccatgggaaccagatggcccctggctgtagtcctgatgctgccacttgctagctctgtgaccttgagcaggttacttcacctctctgagacagactcactgtctggacaatgagtaaaaccctacctttcctgtctcagagatttggcaatgggacccaatgacatcaattggaaaggatgctgtgggtgaaaggtaacctttcaggacagcgacaagcctgtctgggcaggatgaatgggctgtggagccctgtatatcctagctcactctttgaacctcagtttccacttcttccctttttatttattgccggggtcttaaatgagtgttgggggtatctgattctccctctgcctgtacttttggggccaagcactgagctgaaaagacaattcctcctagttctccaagcctacaacctgccccctaaccagctgtgagctgtaatacattctccagtgtcactgtgaggtttgtgccttcacccccattttatagatcaggaaacagaggctcctccaagtaaaggagcttgcctcagatttcacagccaatgagtggaaaagcctctgggattcaaatgtcagagcccatatttttcctacttctcgcacctgttatcatatgctgcctcttcctttaacctgcagttccctcccttcacctccaccgtctcaatccttcccactctttaaggttcagttcagctatgacttcttctatgaggctctactcattttctcagatttcttcctcctccaaatttcttgtaaaaattatgttttttctctgattctaaaagaatgcacattacattagaaaagatacacaagcatacagaagataaaaaccacctaatatcccatcacccagaagcttccagtttttctttatgcatttgcatatgcatttgtgtttacttttccccaaaagttctccgatactttgtcctacttttcttttgacccttataacttcctgacttcggtacctttctgatttgccctaccagagtgtgagcccctggaaggcagcctctgcaccctgattcaggttgccacacatatgccagctcctagtgggctggagggaaggacatgcggttggggaactggaagactcatgctttcagctgtgtgcttcctccctagagtgcaggcagaggaggaatcgaatcccctcagcactcttgtaaagaccacagcaatgagtgagagatggtgcctgccagacataccattctttacttttcagcttaaaacagatacaaagtttggggaggctcactggaggaggcttggggctacactggaaagagaagaacttggattcacaccccagcttcccctcttcccagctctgtcacatttgcaaactctgagtctcagtatcctcatgtgtaaaatggggatagggtttatagggttgtaaggatgagatgatgagttgtttgcaaacaacttctcacagtgcacagtgaaggtcagcaatgagagccagccccgccctttcttctttccaaatgattaatatatctgttaccagcctccattcattatatagctctgtcatgtgctaagcaccatgggggctgaaaaagatgttcttcctgccttaaaattccactggggatgaacaaattacacgggagctgatcagagaggaaggcagtccattatgagggctaattgagcagtgcagaccatgttgcaaactgagttagggcctggagagcttactgtgtgctggggtcctcaggaatgccacagatgcatcaataaccacctctgctactctggaagtagtcacatcaggaagactccagagataagcttatctgggctgtggccacagagctggaatttgtaagctttaggtttctatgtctcatgttaccagcttgtctataaattgtaaattacagccatctgatggttagggaatatgaagtttggttaagagaatgaaatgagaccacgaagattagagaacaggaaaagaggggactggggactacatacccatcagaatcttcattcagtcctgaccctcagcaggagggggatttcatcaggctcatttccatccttgatttcgtccatcctggttctcctgacaaggggcatttatcagagttatggcatgggaaatcacaggggagtaatgtaccatggcatttaagagtatgaacgttggagtcggagctattttctccgctacttactagctgtgtgactttgggcaagttacttagcctttctctgagcctcactttctttatctgtaaagtgagggcgatcagaataaacctccttcatatggttattttgagctttataaagagacaatactggctgagcacggtggctcactgccagtaatcccagcactttaggaggccaaagctggaggatcgcttgagcccaggagttggagaccagcctgggcaacatagggaatgagactcctgtctctacaaaaaatatacaaaaattagtcaggcatggtggtacgtgcctgtaatcccatctactcaggaggctaaggcaggaggatcgcttgagcccaggaggtggaggttgcagtgagccaagatcacgccattgtactccagcctgggcaacaggagtgaaaccctgtctgagagagagagagagagagaaaatactactatggtgcttataaaagttcaataaattttagctgttgttagtattattaaagtaagatctgtatgaaaataaagcagattttttcccccaaatgttcatgtcagaagtatatatttcattggcaaggggctgcttctggaaggttgagaggtatcctgggggaggggatagagcactggcaaaattggcatcacaattcaagtcacctcactcagtgttttttaagttatcaaaatccacagtatgaaaagcatttgacattacagtccactatatttatgcatttataaacaagagaaaaaatcacgaaaaatacagtaccacgtgcagtacacactgattccatctattctttttttttctttttcctcaaatgcacttgccgcctacttattccagacccaatgattgggtccctatccacagtttggaaaacactataagaaatgattgtgtcctctcactttccctctctgggatttagttttccaactataaaatgctcctgatgcccagccagcctcaccgctgctccgagtcaatgccaggaacgctgatttagcacatgctatttggagggtacccatccaggtgctgtgggagggacagagattgagaagagtgctttctgaccccacagaggccatttggaaaccctgggaatgggtgggagggttggaggtggggattgcttctcccctaagactcagcgtgatggaaaggcaatggggtgggaactaactggtgttggtctgtcccatttgtgtcccagcagccttcctgacagcgagataggagaggaccccaggtacagccttgggactgggtcagaagtgggtctcaacaaagggaaggggtagggtgggggtggaggacttgtgggtgggtaatgctgagtatggattcagggatgtgcagcctacatattttcagagacatggggctaaggcctgcattctcaatgagggcaaaatttggttcttggggacagaaaacacttagacattgcaatgctttgtggctgtccaaagtaccaaacagatgccagtatatctgtggtgctgaaatttcatggtgaatggagtcagaaaatagactagcgattgccagggtctggtgggagagagagggaagggactgccaatgtgtatgggatttgttttggggaagataaaaatgttttggaattagatagtggagatagttgcacaacctggtgaacgtacttttagtttcagaggttttctaaacctctgatttttttttaagtgacaggaaagacagaaaaaagtatatctaaaaaggctctaggggtgatcatggaaaagaaagttaagaaatatgactgtaaggaaaggagatgggtgtccctcaggccaggcagaaaattcagtcttgttgctttatgttcatgtgcaaatctaaaaaatccaagtgatatagattaatgaggctctgagtccctcaaaaccttccctccccttacctctccaaaaaacacttgagataccctagaggtggtatgaagtcaggatgggaaggttggctcagctttgcaaataagtttaagcctctggcctttgctctccaacaccaaagaggcttcactttggtatattttctctgccctttctccctccttgtccccaactgtcagtatgtgatgacaggctcagcctctgtaatggtagtgatcatatttcttgagccaaaaatcagacctcatggcatgtgacaagtttgcatatgtggatgagaacagagtggcagaatatttgacacgggagcagcttgggcagtccagggcacatggcactgcacctgacatccctggcagatcccccacattccgtggttgtcttctgatggggccatatggggctgcagatcatgcctggagccctcgcagctccagggctgcgggttcccagccccagagtgcaggtgctggtgtcagcctgcctggcctggcctggctctgtccagagcactccttgccccagctgtttgtgcagctgtatcagcctcagacctcagcctattcattccaacctgaatgcagaggctgggtctggaggagccacattgcgggcttcatactcctgatctgacaagttttccccccagagcctgcaccaatggcacctctccccattctccctcttaactgggtcctccagggccctcctcacacacccacgtggtcaggcagcagaggcttccccaagatgggcacaccccactctccacacctctctatgcagcatttgtggctacagactgggtccaggggattgtaaaggcatgctcatgttgggttggagggagctcaggatcttcctggaggatatggttcactcccatgagagctcagtatgcctttcctcccctgctgcagcccagagcgggagacagcgaccgacttggatatcaggtactgcgtcctgggaacattgccccccagggtcaactccctccagggtgctctcaggcccaagggagccacatcaccctgctgggcagcccccagaccccagccccagtgttgggggaggccagggagggcccctgtgctccaccaggtggctcgggagctgctgctgtttctgtgcatccatttactcccttcacataagatcatttttatctgggatctctttttcttttttcttcaaaaaccacatcactcaaaatgtggcttccttggctctgcttttaaaaaaaaaaaaaaaagttcttccatttggagaattacctgctgacttcaaagtccagtggcttgagggctacccaaagagggaggaagccagaagttgagtgttcccttggtttggtcacacttttgggctcctccctgactaaggaacaacagactgcagggctggggcaggctgggtgtagggcagggaggggatgaggtcctgctgccccagtcagttgagacccagacctctcaaacctgcctgggggaaggcaaggccaccagaggccacactaagcagatttctaccaactgcacctccccatccccttgcctccatctgagccatcagcttgacaactgcctctgagaacaagcccctgagaatgccttccgcaccccctactcccgccctgctttttccaggaagagaggccccgtggcctatgcttcgcagaaaccatggctgctaaatgccactgtggaggagaacatcatctttgagagtcccttcaacaaacaacggtaaaagcctgtcggagggaggcaggatgtggaggggaggaactgtctctggccagcctgccccagttccgggcccctccatcgatcacccacacccagccatctcactccccaggtgcttacctgcactccagcctctccatatggtgcacctggagaggggccaggtgtgcctgagcattggggcaatccagctcccataggggagagggcaggaatggagggaagggagagagccccgctgccttttctctagctggtgggagggctagctagctctctctgtgagtctccattcgcctggctcctgcactattttccctccaatgataatagttagggctagcatcgactgcgctcttactacataccaggcacagtgccgagctctttgtacacggaatttcctctcatgcttacaacaacctcagtaggtagatattattgttattcccactctacagatgaagaaccaagtttcagaaaggtcccaaggccacccagccagtaagtgaccaagatgggtctcaaatccaaagctgcctaacacctaagtacatgtttgtcaccaacatactctgatgcctccatgaactctggctggcacctgcccaggctaagggctggctggggaagtatgagaggaacaggctgggcaaatatttgaccagccatcatcattactgcctaaaccaaccagcagtggttttccctgcagtgccccaagcacgggttccggctgcagcttttcccactgcacagagatcatgagcgccctttcatcacttactctgcatatttgttcccaaccaattccatccttctagtatttaacctgcccaaacgctgtgtgaagtgctgacctcagctcttttcaagctcacacggtgtttgcttgcacccaagcgggaggcctattaaagccattgctcaccctgggcatagctacccagagactaatgaccctctgcaagtgctcgggccaactctgaccaggctgaccagctgcatcccctgcctctacccacgccaggtacaagatggtcattgaagcctgctctctgcagccagacatcgacatcctgccccatggagaccagacccagattggggaacgggttagtagcagcctctgaggggttttttcaaagccaggacccccaacctaccatgccctgagacactactcaggacaatgggtaactaggaaataggagacattgaaggctgaagagttgcctgcagtaaggtcaaacatgttgttcttgatgatgtcctttgacaggttttcagtcctgcttggagggcaaggtcagcttagtgccctcccaggctggggatcttcttcatttgcaccccaggtatacactgagagcccacacagcactgtgctcagcctggggttgtattgttcctgttcatcctccagatggggtcccctccacaagcttagacgaacaggattctcctgtgactgtcctccttttgtgtgattttaatccctgctgcctctgtctttgtttgtactggtcagatggtccctagcgcctacacaatgaatctttaaagacttggggctcatgctgccctcttctgaatgaattcagtaaacacgtgcaagttccttctctatgcaaggtgagaagcaggcaaagaagtggatagagccaggcctccatcccaaagagctcatagtccagtagggtacaggacagtgtctcctgaatggctgagggcatgatgtgttcctcctctttggtgacagggcatcaacctgtctggtggtcaacgccagcgaatcagtgtggcccgagccctctaccagcacgccaacgttgtcttcttggtgagtgcaagttcccttggggtcctggtctctggctgcctcccaggcctaactgcccacctccacctccccgcaaccccaccatcatccaacaatctccctctccaggagtaaatccctcctgccagagatattgccttatcatcctagtgatagggaaactgaggcaggcaaggatagcacaaatgacccattgcagacttcagatggagctctgcagtagccaatgaggagaggcaagctgtagttataggctgcctgtctgtgggacagcccaacccctcaacacttatgcagcccgactataagaatggctgataacagaatgtgtgctgccacttcccatcttatgcccagtgcagacattgctaattgttcacagcattatttcccatggaacttaactcatcctcagaatccttctcaacacagcactccaggtaaccactagccatcaaacatgagataaaactaggccaggcgcggtggctcacgcctgttattccagcactttgggaggccgaggcaggcggatcacgaggtcgggagatcgagaccatcctggccaacacggtgaaaccccgtctctactaaaaatacaaaaaattagctgggtgcggtggcgggcgcctgtagtcccagctactccggaggctgaggcaggagaatggcgtgaacccgggaggcggagcttgcagcgagccgagatcgcaccactgcactccagcctggggacaaaccgagactttgtctcaaaaaaaaaaaaaaaaaaaagaacgtattcgcaatccttacactacttcatgtcaagttctgttgtgtcaggtgccttgactgacactgaagaattctaagaaccagtccttggcctcaaagatttagaatctgattagggagacagagctcacccagttcaagaggcccagcccggttcaaatccaaactgtgcggcataaactatgagggggccttgtccagggagacaactgtgagggctggagtaatcagggagggcttcctggaggagagcctcaaagggagagtcaattaaacagaaggaaagagggaggccatttgcacagtgagttggaagaaggaagctcaagtctctgattccagctttattccctcccctctccctacaccacacgcacaagcactcctttactaaagacacttcacagtgggaagattcagtctccgttaccgtctgacacacacacagcgttttacaaagcatgggtgcattcgcgatctctcatgagatttaaacaaccctgctagagaaaagtgaagtggacattttatttcagtaaacgtttatgaagcgtctactctgtgccaggcactaaacgtttatgaagcgtctactctgtgccaggcacaggcacaagaagtctcagttcttgggagtgccataatcaggaatggacaaacaatgatcagatctggctttgcgccagtgtcacgggaatagggaggaaggaagggtaggcgtgggggtcaggacaggatgcaggaggaactggtgcttaggtgagcgaaggatgggtgggagttcacaaggcagacaaaaggcagagcagcactccaggcagaggaacagctcaggagaaggcccagacggcaggcttcctgggaacctggaatgcagagtgctgggaaagcacagatgaagcatgagtctagaagggaaagcgagaggttataaagcacctggaacaccagcccacagggtttgactttagagatgatggggagccgttgaaggtccaggagtcaggcagtgaagtgattagatctgtttgagagtgatatctgacaactgccccattttaaatgaggtaaccaaggcccagagaggttgggtgagttgtccaaagccacacagctaactagcttcagtccctagagcagagttgatagaactctaatgggttttatactcattgtcacccctccccaccatgcctttccctaccctctactctcttcctctcccttctgcccaggatgaccccttctcagctctggatatccatctgagtgaccacttaatgcaggccggcatccttgagctgctccgggacgacaagaggacagtggtcttagtgacccacaagctacagtacctgccccatgcagactgggtgagggggaacaagggggtcaggctatagggggcagggctggggaggctgtcaggcatcttggcaggaaccaatccgttgtcttggtagcaactgctgagggccacaaagcataagagaccagcactggatggctttatgcatgctgggcatttcagggagaccctgtacaggccaggggtttggtatcacctagacccacagacactccccatcctggcccgggccccccatggtacactcaaggctggcaccaagaagtctcaggaataatcaagtgctcacttctcaccttctgattcctgcccttttgatgacccatccccgcagtcatggggagtgcccatttggatggaaaagccctcttcccaccctatgaccttcccggggtggatggatgcaccaccccgggaatcatatgggaaatatggaaccaaacaatagcagtagtaatagaaacttcaggctgggcgcaggggctcacacctgtaatcccagcactttgggaggccaggacaagaggatcacttgagcccagaagtttaaggctgctgtgaaccatgatcatgccactgcactccactacagcctgggcgacagagccttgtctctgaaaatttgaaaaaggaaagaaagaaagaaagaaacttcaatattatcagtagagtccaatgttgtgaaacccctcattaactaaatttccatactcttcagtaggtagaaaataattactttttgattcattagaaagcacttaatttttaagatggagatcatgtaattttgaactctaggtcttgcctactcctatataaattctcctctaaacaacagccaaaattgaggccctctttgagcttcaggctggtgccaaatggctctgcttattttccccaaaataaatcttccttccatgtatgatgagaccccctccagtataaagaagacccaaagaaaatcacccaaagaaaaaaggcccaaagataagacccaaagacctaaagatttaaatatatatacagatacagaaggtttgtttctgagtttctgtagtgaccttggcaataccttgtagttcaggacaatcctgaggaacacagaagtgctggcttccttgaggaatcagtgatcaggactctcgagccccttgaaccccagcatagggcgggagggggtgagggcagcaggggtgggtgtctgaattaatgtcaggtctacgtgatggtgtcatcaagtgttccagataaaaagttttattgagccgggcgcggtggctaatgcctgtaatcccagcaccttgggaggccaaggcgggtggattgcttgagcccaggagttcgagaccagcttggggcaacatggtgaaaccctatctctataaaaaaaaaaaaaaaaattagccaggtatggtggcgtgcacctgtggtcccagctactcaggaggctgaggcaggaggatggcttgagccaggaagcagagattgcagtgagctgagatggtgccattgcaccccagcctaggcaacagagtgagaccctgtctcaaaaaaaaaaaaaaaaaaagatttattgattccaaagaggcatggccacacacacttagaccagcaggtgctttgctaagccctgatggaggctgccagacccgccgtcaagaggagctaagggtagtgtacaatgagcccacttagtgtatgacggccgctgccgtgggtggagtccttgtgagtaaccagccagcttgagcaggatgcactaatttgctctgcaaacccagccattgagaaatacgcctcagatgtaccgaactctaggtcctaggagtatgttggttggggtaggttatcaataccagcccacttgcagtggatgagctggtggccatttgtagtgaggaaagggatgtgtcaacctccatcttagactccacaattgagggatgtgaccaccattcctccccagccagcccccaaaccacgtttgttgctgcctttccagatcattgccatgaaggatggcaccatccagagggagggtaccctcaaggacttccagaggtctgaatgccagctctttgagcactggaagaccctcatgaaccgacaggaccaagagctggagaaggtgggtatatccagggatggccaagcagccacccctggatgcaaaggttctgctagaacctgaactcataaaggtcttcctgtccttagtgccccaggaagccccctaaagggcagatgtgggagctgggcatgaactggctcctaccagaggagagacagtacctgtgccaggtgcccagggcagaatcaggtgggcaccttcgccttatcctgaggtagtcagatactatttagttgcaaagtttcagaaaatcaactcaaactggcaaagaaaactaagcaaagaaaacaagagggaattaaggatttattgacccatgaaaccaaaaagtccaggtgtgtcatagctttaagtgtgctggatccaggtagtcagtgtaatcagaaatctgtttctcccatctcttgactctgctcccctcaaattggctcagctcccctcaaattggctccattctcatggtatcagtgagggccaccagcagtcttaggtttacattctcccagctcaacaactctgccagaaaaaaagtgcctctttccccatagttcagcaaaagtcccagggctgagtctcactggtccagtttggtcatgtgcccacccctgaacaaatcactgtggccagcggtgtggaatgtgaggattggcctgtcctgggtcacgtgccactttgggagccagatccacctgaatcacagagactaaaaacaggggaagagtggttccccacagggatatgggggtgctattatctgatgaaggggaaggactaaatcctggcaagatgaatgtgtgtctgtctgcccctccctcaggcagggacaaagtagaaatctgacattggtcatcaccagagtagttaccccttaacttccccttcccccaccaaccatatatcctgaagacattgcccaggccacatctgtcttttaggagactgtcacagagagaaaagccacagagccaccccagggcctatctcgtgccatgtcctcgagggatggccttctgcaggatgaggaagaggaggaaggtacaggcaatgggactgggagtgaaattatggcctgaggtctgatcagccacagagaggctaaggtttggggttctgggtgtggtgcagtagtgtgcctttgattaaatggcttccctctgtgtgcccccgttgtcccctcagtaagtggggataaaatgccctgattcaccctcagagggatggaaatgtgtagccacagagtgggttcttgcggcctgcagaggaggcagctgagagcgaggaggatgacaacctgtcgtccatgctgcaccagcgtgctgagatcccatggcgagcctgcgccaagtacctgtcctccgccggcatcctgctcctgtcgttgctggtcttctcacagctgctcaagcacatggtcctggtggccatcgactactggctggccaagtggaccgacagcgccctgaccctgacccctgcagccaggaactgctccctcagccaggtgtgactggcggcccatggcagaggttgggagtggggatgggggaagggctgagcccatgggcaccctggaactccaaatcactctctgcctgtgaaggagtgcaccctcgaccagactgtctatgccatggtgttcacggtgctctgcagcctgggcattgtgctgtgcctcgtcacgtctgtcactgtggagtggacagggctgaaggtggccaagagactgcaccgcagcctgctaaaccggatcatcctagcccccatgaggtacccgtctcccctggccaggctgggactgtgagcaagtcactgttctctgagccttagtcttcccatctataaaatggggatatacaacctgtcacaagcttgtgggggtgactcaaggagacagtgtgtgtaaaagtgccctccttgtgcaagaagcagggagaaactggcatttactcagccagatactgtgataggcattgtgtgtggttagctcatttaattgttaccatggccctttaaagtgagcgtctgcacatccaagtaaagattgttttctcctccctaagtgggtgtaatttgcccatccccacccatgagttcagctccctgccctcccctcactctctctccctcagccagcctcaggttttgacactgggggaacaggtagctgttctattaataatttcctgtaatgggatggataaaaatctcaaaggccacttgatgtcaaagaggtttaaagttgtccctgcccaattggttggccaacttggcttaaaaacacaacaggcaaacagattttctggccccttgtcgaggctagacctcacaatctaactgcactttttactttccagcctcatgagttttctgtggcccacagatatggcctccaagtttatttacttttactctctatttgccccagctctgtagttctgaaactccctggttggggttgggctgactctgggtcagccagccggcaggctgtccccagggccctgttcctcttggcaggttgtccctctggagaggactctgtgtcccaggaggacagctgctgagtcaggccgagccggcagctgagaaaggcggcagtcgtcagatgggcttgagaaactgaaaggctaacgaaaggccagcgcccctttgggcagctgcaggaattcacggggatacaggccagatgtctacaaattggcagaggatgccagacccatgaatgactccagagacacttacatgaaataattaactatctcattcagtaaacaggaagtaaatcaatggacaaatgagtaactcttcctctggctgcctcttaggttttttgagaccacgccccttgggagcatcctgaacagattttcatctgactgtaacaccatcgaccaggtacagaggaccgtgccacactatccccccttccagagacacctcggacccctgggggcttctcctgtctgaggctgggttccccagatcaggtgatcacagccctctgggaagaagccagtgtccccgatccgattataatgctgcttcagggctggggcctccctcgtgggagcctcacagtaaggctgagggaaaccagatccctttagcttccacctgagatcccactggctttctctagtaaagttccagcatattctgaaccaaggtggctgattgtatggagaatattcattttgattcagcctgtgttctttatttaccattgtaccagatggtgtgaaaacaaaatcttgattcctacctcagggagtttaccttgtagctggagagatgagatacgtgcctataataaagggagagcaaggccgggctcagtggctcactcctgtaaccccagcactttgggaggcggaggcaggcggatcacttgaggccaggtgttcaagaccagcctgatggccaacatgatgaaaccccttctctattaaaaatacaaaaattagccaggtgtggtggcaggtgcctgtaatcccaactacttgggaagctgaggcaggagaatcatttgaacccaaggggcagaggctgccgtgaaccgagattacgctgctgcactcaagtctgggcaacagtgagactcagtctcaaaaaaataaaggatcaaaaaataaagtgagagcaaaacatggcggccagtagcactctaaacacagtcaataccaaaattcacctcactctctccccctcgtctccctcagcacatcccatccacgctggagtgcctgagccgctccaccctgctctgtgtctcagccctggccgtcatctcctatgtcacacctgtgttcctcgtggccctcttgcccctggccatcgtgtgctacttcatccagaagtacttccgggtggcgtccaggtgatggcctcaggggtgaggggtgggaggtgctttgcaatgtgcagtttggtgtacttgctagactcatcgttatgagagtaatagggtcgtgttccctccaaaaaataaaaacaaaaaacagaaatgaaggaaatagaaatatccacatcttattccaccgccctaatataatagtctgccaacacacgcacacactgaggttgacatctgaattatttccttgggcgatatggtcaggactggaattgctaggtcatgataaatgcacattttatgcccttcattcattttgccaacatgcttcccaggagggttgcatcattctagtggtcaggctgattgctgatgcatgaaatcggcgggcacctgattcaagcagtgttatgataacacctcccagcccacgtgagtccagagtgtagctgtaagccttgacttgagggagcctctcacagccattctcatggatcacatttgccctcatgagctttggatccatgcacgcctctttcctcctcaaaattttctaagaatgttctctagggagttctttctgggagtgattctcccagattcatagaaactcatagattcaaaaaattgtaggaaaaaatttaaagaacgtctaggccagtgtttctcaaactgccaattacagcccatcagtgggtcatgaaatcaatatcatggatcacaaccagcatttttttaaaaatgaaaaaaacatcagactgtattcatagagtaaagcaagctttgcttcatgaaacctttgtgttggtcatggaggtgtgtgagtactgatttgtgagataaaatatatttctgactgcaggttgtggtcagaaaggttaagtacctttcccaagtgcacatagttggctagaaactagagttgagatacttattagcaataataaaatttagatgcattttggacacaattacctgccccaaaggatcaacatttgtataaatggctttttgcttggatgatccagaatggcccgacacccacacgaacaacatagctttttgacactcaaaaaattcaaagtgctgcacaagctgttctacaaagttcatttcttctgccagagaaacagcccagtctctgtggcacccagtctgaccctggagatggtttatcagggaaatcaacttcctgcatcccaaactggcctccctggcactgatgtgcttgtcgaggtgcagctttggggagcaggaggcaattctgttgccatggaaacctctggccttaccccgagacgaaacctatcatttcagcacatcactggccagggtctaaagagctccttgatggggtaagcggaagacggggttgaacgctttgagtttggtcttctgttcctttggccagctgtctcaaggttcagattgttcacctgtaaaatggaactagcactgcctgcccagccttagctcagctccaggctgtgcagcagaagtacagggacagatggcgacctggggttgacaatgcccaggacagcagtaattgtgccccacatcaggctgtgtctaagcattgtacataaacgatctcattcagtgctcacaaaagctcaatgggctggtggcattgtcttcccccttcacggggtaagaagctgaggcctagagaggtaaggccattcacccacacagcggtagcaggtggagctaggcttcaggcccaggccgagccctgagcctgccctcttaactgttccactctgttccccgccacagggacctgcagcagctggatgacaccacccagcttccacttctctcacactttgccgaaaccgtagaaggactcaccaccatccgggccttcaggtacgagtccacattcccccaaggtaggagtggaacaggggtggggccagggggcacaggccatgagatttgattctcaggactccacttgggaaggccaaggacacgttctctctcaagctgcctcaggtcccaaggcccaagggatatccaccagcagggacaggccaggtgggctcccactgaatgttctagagaggaaaattccagctctgtagacaagcccaggacctctgtgaggcagagcatgaaaagagacaaagctgggacaagtcttcatgtatcaacgctagaaagggccttaggtgcgggccaccctaagcccttcttttattaaggagcccctgtgtgccaaacactatgctgagtactgtacaggccaatcccactcattctgcactgcaaccctcggtgctgagaatggtcatttccattgcacagacaaggaaactgaggcacagagacgttctataacctctctgtgtaaggtgccacaaagcccagacttgaacctatttgttcatgcaacaaacatttactaagccccgactatgtgctaagccccatgccaggcactaaaaagatgagtcaaataagccgctgccctgcaggcgtttacagcccagactttgagcaggccaggataaatccacgtgacaagtattctgaaaaaagcggattcaagggctgtgggagcatagaagagagacagtccgggaaggtttttgtaccagaggtgtcatcagaactaggactcaaaggaggggcaggagttcaccaggctgaggaattcctgaaaacttcagtgcccctgccatcgtctcactaccctgagtggtgatgttggggtggacaggagcatctgaggttgcctggggaatgagggaagctgttgtttcccactccccaagagtctgtctgatctccagaggcatctctcttccagtcaggcaggccagagacccctgacacacaaagttgggctcttttctcatcttcatccagagagtgataataggttatttttagggtggcacagctgcacgaagtatgacagtaaccatgagacaccaagcactgtgtccaggagtaaccatagggcacaaggaccagccaagggccagagaggcttacatctcctccccccaacccctgaagtccagcttcagccctggagaggtatccaggcccctctgcccaccctggagcacctagggccagtggaaatccacctcttagggatcttgtctaagtaaagaagagcagagcaaagctctgccctggccttggcgctgctccctggacatcccttgcccctggacaagcctatgctgtgtcttccacaaagaagcttgctggggactggattatgactctagagtctcctcccagcctcctcttctcaagcctgaacttctcccgttccttcaacttccaggtccctcgacattactgagcctagcctttgctctaagttttggtgatttccctctctcaattggtgtctcagagggccctggggtagagagatggtgactcttctagagtgggccacagccccttgtgtgcagatcccagcttcctgtaaacagcctcagatcaggccaaacctgtggtcagccagagccactgctacccagtgaggtcttccacaccctactgacacggtgaatgatttttaaatttgaatgaaaggctttttaatcaaccccatacacatttaatgcattggctttaatccagcagcctgttgagagctattagcacttattgattgcccacttactgtatgccaggcaccgtgctaagtgttgtatgtgcattattacatttaatcctcacaaggaccacataacataggtacgaatcgccacattctccagatgcagaagcgagacccagagaggctgggtaatcaatccaaggtcacacagactgcgggggctggcgctgagcttggaacccaggtttgcctgaccttctgggctttcctaagagatcttattttttcccaaaagagtttcaagagtgcccagcactgggctcagtggcgggctcggaggttgttttcgttcatgtaggaactatcacttccccatttttttcataagaaaactgagtctcagtcctgatacacagccaggaagttgtgatgttcaggctccaacctgggtttacatggctccgaggctggggctcttttctagtcctcagacacactgtcgcacgcctgtggcagaagctcccatctcacacttgccgaccctcaactcacacagtcctgagacccacatacgctgagcgcctcacactcctataacacgcacatgccctgatgcacacacattttcaacacgcacttactctacccttcaggcatggtttcacactcactgcagacacgtcaccctcccacacgtctccaccctgggggtgtgcagtagcatgctctctcccacctcagaacctcccttcagtcccctcagacacatgccctctctccacgcagagacaatcaaagctgaactaacaccttccagggtgaaaagcaaatgcccagtaaggtacgtcttgggtgcctccgtgtcccctgagtttggtcctatcaaaccagcgatgatgaggcagcttttctttcgttccttcctccatcatcaaacaagtgctcctgcatctcctctgggccgggcctacgtcagcaaggtctgagggaagcggccaaggagagtgatgacggcagcccaggttgatcagagaaaggaggcaggtccatgcgcagtaactcagggaaaacatgatgaggacctaaggatgagaaagaagcctccagagttccctgtgcagagagattccatcaatttcagagggtcaggggagtgccatgcattcatccaacaaatatttattgatagtgccaggtgctggggtatattggtgaataaaacatcttcatggaatttgcagtctattgagggagatgattataaatagctagagaaatgcatgtacagcagatactgtggagcaaacaggttgcagacaataataggggaaacctactttatagtaaggtagtagccaggaagagcctctctgaggaggcagcatttaaggcaagccctgaaggttgagttgagccagccttatgaagagcaagggcaaaagccttccaggaaaagggaatagtgtgtgcaaaggccctggggtagggaagactttagtattgtcacagagcttttaaaaagctgagtggctgcagcatagtgtgtggggtgtttgtggcaggaattaggttggcaggagggggttcttcatcctataagcagtggaaggtcattaatattcttttttatttgtttttttttttttttttttttttttttttgaggcagagtctcactttgtcacccaggctggagtgcagtgaggtgatcttggctcactgcaacctccacctcccgggttcaagcaattatcctggcttcctcagcctcccaagtagctgggattacaggtgtgcaccaccatgcccagctactaatttttgtattattagtagagacagaattccaccatgttggccaggctggtcttgaactcttgacctcaggtgatccgcccgcctcagcctcccaaagtgctgggattacaggggtgagtcaccgcatccggccggagatcattaatattctaaacagtgggggagaggacacagtttgcgatttagatagattaagccagccactgtgtggagcatggactgtagggagacagcaggtagacgtattcaggaagctgatgcagtagtccaggtgagagtttgtggtgggcaggaagcaggatagagggggagggaggcaaggactcttttagagagagacataagaggacttgccaaggggctgaatgtgaatccaggtgattcctgggtgagaaactgggtaaagggaggtgccccttattataatgggaaagacctagagaaaatggatcttggggtgaaaacaagagtttggaggaggtggggattctggacaggtttgaataagcagaaaggagtggggtggacattccagagagggatagcttacatgaagtggccacggtggcatgtctggggactggaggggccctggagcctccctctgcaggtagggagactcctaggagctatgtggaccaacactgttcccttaggagcttctcatcctccctccaggtatgaggcccggttccagcagaagcttctcgaatacacagactccaacaacattgcttccctcttcctcacagctgccaacagatggctggaagtccgaatggcaagtgctattcccctctaccctggcctctgataggagggtggggccagagcaagagcacacaggtacctggggatgaaagagaggataggataccagatcgtgtggacaccaagccttcctgcttcccccagccctggtggtcctcctagtgtctagcctgtgctccttttccccatatcactgcctggaggcttgtgtatctgaggtgtgtgccagtggcaagaacagttgtggtgaatgtgtatctgcagtgggtcatatgacacccacattgtgtgtgtttgtgggccagctgaggcgtgcatgttaaagggtgtgcaggggctagggggtaggggagcatgagcttgtgggacatgttggctcctggggctccagccttcgcagcccttgtgtgtgtctggtgacgtgtgcatgagttgcagggctggagtggaggcctggctgagctgctctctgccccgaaaaggagtgaggtagaacaggggcctgtggctctaacccctgagcgcccaggtcagctcctctccctccccaggagtacatcggtgcatgtgtggtgctcatcgcagcggtgacctccatctccaactccctgcacagggagctctctgctggcctggtgggcctgggccttacctacgccctaatggtgagcggcagtgggctagggcagaggaggggtcagacaccagcactcccggagcaccttcgtcactggagacatgagacactcccaggccttaccccaatttcatttgcatctgatgccagagggacagtgcgggcaggaaggctgaccagcaggccccagggcccaggccccagacaggtggaggttggggagccacatgactgaccctccctgtgcctccagggagggctgctctgagcaggcagtggatggcagcaaaaggaatctggggccctggcccctctccagccttaagaagagccattctggtggctgaggacagaactaagcgaccatggagtgtgcgccactggcttgctccccacaggtctccaactacctcaactggatggtgaggaacctggcagacatggagctccagctgggggctgtgaagcgcatccatgggctcctgaaaaccgaggcagagagctacgaggggctcctgggtgagaggctcagggagaggggtggggaagagtccaaggaggagtgtgtctgggttgggggccacaagggagcctggggatggggtggcactttcggatactagctgtggcccatgcctggtggctgagcccagcccggcccccagcaccatcgctgatcccaaagaactggccagaccaagggaagatccagatccagaacctgagcgtgcgctacgacagctccctgaagccggtgctgaagcacgtcaatgccctcatcgcccctggacagaaggtcagagcacgggcccaacccaatgctgcaggacaggcgtgagcaggggatggggcatgcacggagctggatggcttcgcagtcacctcgtggccctccagggccgaggcctctcactattcagacatcgcagtctcctgccctgggcctgtgggggcccatctttcctctccttctattgccttcccccagtgctgccctcaggccttgtcttctcactcatccaccaaggagaccgacactctggactcccccagctcacacgggctttgtcagggcctccctctctgcgaatggtcaggggctttccctagggcactgccccgagcttcagggcagggacctgggggcagacagcgaggccacccttgtattgagggtgagcccctgcctatggccctggcccagctctcctctcgtttcccactctgtctctttgtctctgtctcactttgctgtggctgtccatgtcattctctgaccttgggatgtacctctgtccctgcctctctcatccttctatgtcactatctgtctccgtattgtaatttctgttggtacccaagtgccaggaagcaacgggatcagaggtggctccattgtagggcggggcacacagacacatccatgcataccactctcagctgcccctgtgtcctcctgccacacccatgcccatagagacacaccactgccccccagctctccttcagccaagtacccggcacacccagacccacaccaaggcccaggcaaatggacatccatgcctgcacttgcgtgccggtccctgtgtaagccctctctggacccactgcaggaaacaagcccaaacctgtggtgtccaaagagaaactagtcagaaaaccaggccaaaaagataccctgtgacctcccacacctgcacacacacccagagctagcatagaggctattcccagcagccccagagtcccagtggcggtgcctgcttctctctttccagatcgggatctgcggccgcaccggcagtgggaagtcctccttctctcttgccttcttccgcatggtggacacgttcgaaggtgagttgtaaggcgggcaccccacgtgtacccacagccaccagatgaggcctcagccctggcacgtggtcagacatgacaggaggcccagcagtcaccgccttcccctgcaccctcactgggacccatgcagggcacatcatcattgatggcattgacatcgccaaactgccgctgcacaccctgcgctcacgcctctccatcatcctgcaggaccccgtcctcttcagcggcaccatccggtgagccccaccacccctcaggcccacccagccccaggccggctcagttccatcagatctggagcacaaagaggagggggttgggggagaccaggatcccagaggtgtttcctgctcatgcccttctccatcccatcaggcccaggcagcctctggaaggggatcccccacccatgggtctaagatgctgtcccccacccactgccaccacctcggtgcttctcccagccagacctccaactcagtctgctctcgctcactgccctctttgccgcctggggatgcaggcaggaccctgctccctccctactggggctttctgtgccacttccagatttaacctggaccctgagaggaagtgctcagatagcacactgtgggaggccctggaaatcgcccagctgaagctggtggtgaaggcactgccaggaggcctcggtaactactcctggctatgcagctgggttggttgggcactcaaggaccctgtaaggatggcagacagaagcccgtgtctcaggtttgccccaagtttggagtctgaagcctggcaggaccatttagtcctacttctcactatacgggggcccagagaggtcaggtgtcttgccccaggtcacacaactggtcagttcagggtctggctcctcctgcagggtacagcgggtacagtcagggatccttgtgagacagagattgcgagtcccccatgccaagggggcatcttcagccctgccctgccccatccacctgcatgcccagttctgccttaggggaggagaagatggactgggcaatcatagacacgggtcactcatcaaggccaccggtgattggcaaagccttggtatatttgctgcagctcctggagcattgggggtggccaagccttggtttcaatgaatcaccctaccaaggccctacatacacactcagtgcacccctcagtgcacacgccccctcccagaactgcccagggccacagcagcacacacctccaggggtgcccttctcgttgcagtccttgcagacggcctccacattgttgtgtcaggtgcaccagccctgcacacgcctgtgctcttggacacacacccacctatttgcccccatgcacacattttccaacagccccccaagccatcccatctgctccactcacagcacaagattaactcagtcctacttcatctccccgggctgttttcagatgccatcatcacagaaggcggggagaatttcagccagggacagaggcagctgttctgcctggcccgggccttcgtgaggaagaccagcatcttcatcatggacgaggccacggcttccattgacatggccacggttggtcctgggcccctccatgggaccatggtcttggaaagggtttagtgggatgctagggagaaatttgcacgaagtagtcctgaggctcaagttgcctctaacatcaaatgctatgtgttgcagaaaatgaaaagagctggggggaccctgactctgtctagtcttagggaatgttacacacacacacgcacacacaaaaacactatgcaaacacacacataagctgcacacacagacccacacagacttcacactgtcacctatcacaacagcacacacacagccacaaccacaacctacatacacacacagagctgagctcccaacaggctgagtccagtccctgagtgccgggaacctgttcagtcctgtggggtgggggtgggactaggatcggggtcagatgggagctgagccacagacctgggctccacatcccccaagccaggccagaccccatccactgggcaggtgagccaacagctgttgcccccacttggcaggaaaacatcctccaaaaggtggtgatgacagccttcgcagaccgcactgtggtcaccatcgcggtaaggggcccattgatggggtgcagagggacacccagggacaggactggcctgttgtggccgtcatcagtgcacagcccctgggcttgcctggtcccagtaatcaagaaagaaccctgaagcaggcagttcagggcaaggggcctggagggcatgcagggagcctgggttgcaggatttggggtggggggttttgcccctgtgcttccctcagacctcccctctccttctccaggttccaaggcctgcccctgtcccaaggccttatatgttaggctggcgttacttctccataggaagtgggggaggggttgtggagggtctctgagccttgaagcctggaggtggggtagagttgggacttggagaggagagaagggtggtattagcagatggagagcttgtagtcacatccaccccaggaaagtgcagtccccacagtgacaggacattctggccacatgcctcatcctcctcctccaagccgcaggagggccaccctcagctgtggcccccaccgcgggtggtattcccaccatcctgacccgccccctcctgccctgcccagcatcgagtgcacaccatcctg

SEQ ID NO: 15327 - DNA, 83843 bp, Homo sapiens
tggccttctgcggcagcgagaaccactcggccgcctaccgggtggaccagggggtcctcaacaacggctgctttgtggacgcgctcaacgtggtgccgcacgtcttcctactcttcatcaccttccccatcctcttcattggtgagtgcgcgcagcgagccgcggaggaggggacgggagagcagggagggaggaggaggcgctgcgcgccgcaccgctcggcgtccccttccggcccgcgaccgccgtccgcctcgttcccggggtcccctgccctgtgtcctgcccgccggtccccgcactcgcacaccagctcatcccttcactcccccggtgcccccgatcccgcgccaaacacagcggacgtttgtgacccatgggatcaccaagttttgcttctgcagggccaagagctgggatggggaaaagggaaagaggaggtctcagcacgcagtgggaaactggagaggggtcgggcctcaccctccgtggcgcagcttagggagccgggtcacccctcccgcaaggcagcctccctgtcagccgcagctgggcctagggaagagggaagcctgtgctttggagtctgggatggaggcccagctaacccctatgctttcaccgggctgagccgcgcagtggtccgtgatctctgacagtcccaggcccgcgccctgggcgaggagaggcgagagctagggacttggattcccttcccccgccaccccacccgggcatgtgtctccagagcgcaacttctcaggctctgcgcaaagtagctccgactcgccgacgcagcgaccccggcgcccttgcttgcaaagttgggcgccacggccgggacaatcgtgcgtgcctctccactgaggtcccccccatctctctccaagaccttgactcttccagaccagtcaagtctatcaactcatagggtgtcccctgcatccccaaaacgtgttcattcactttaagaaaacaagcaaatcttaaaattcatatacagctttggggaagaaaggaaagattgtcacaaaattagatttacaagaggttgctgcagaagcagagttgctagttattaacaaagacagttagatagaaatagaaataaaacatacaaaatatgtgctcatatgtgcatcaaaaatcaaaaaagaacagcatttacacttctgttctcagccaaacggtttattaacctgatgacttgtcacacaagaagttagtatgtataatggggtaccttggcagggcacagtggcttacatctgtaatctcagcattttggtgggctgtgacaggaagactgcttgagtccaggagttcgagaccagcctgggcaacatagtgagaccccccccgccctttctacaaaaaattaaaaattagctgagcatggtgatgtgcgcctgtagtcccagctactcaggaggctgaggcgggaggatcacttgagcctaggagatcaaggctgtagtgagccgtgatcgtggcactgcactccagcagaggcaacagagcaagaccctgtctcagtaaaaaggtgtggtgggggaggtaccagcataggaccaggctgaatgagttggacgtttagtttgtgtgtaccagccttggggatcctcatgtgtaggtgtcaccctcaccatggacccaatgcccaagcacctttctggggttcatgcaccctcttcctcctccaagtgggcaggcatcctgcctctgactgtctctccctgcaggatggggaagtcagagctccaaggtgcacatccaccacagcacatggcttcatttccctgggcacaacctgcggtggatcctgaccttcatgctgctcttcgtcctggtgtgtgagattgcagagggcatcctgtctgatgggtgagtgactgtctgaggactcaggaaagtgaatctgctccagggtacttcctgaaaggcccaaggagatcctagctcacctatattccacaagcccatgtcttttgttactacatccagcagctcagtgtcttctatgtgccaacctctctgagctgggcactggacgcaagtgagtcccaggccctgccatcagtccaggagagcagagggaacacggacctgcatgccaagtcccagtgaaataatgctagagcctattagaatgccacaactccagtgaaaaatgtctggcctcttctacaacctgccggagttaccttcttggaaaaaaaaaaaaatctaaccatgccacccactcttgcataagacctttccttggttctcagctgttttgaagatgtggtctcagatcctcagcccaccattcaaggtcttcacagtcagccccacctatctctggcctcattccccatgcccaccttccgtttgggcctcacagcacactcctcacacctctgctacagcacagatcacactgtatgttaaagtttatgtctatttgcaaaactgtcttcagagtcagaaaggcctaagagttagaatctgagtcttgttcatctttgtgttcacagtgcaaggcatgtgataaacataaacattattcagtccataaacatttattgggtccttaggagaatgaatgaaaccatgttacaaataagtactctgggaggtgagaggaaggcagaattgggcaagctccatggttgagagggctttggagcggagtctggaagggtgactaggcttcagacacacagaggaggaaggagagagagaactggtggtgcctgagggaagggaaaaggcaccaaagagaaaagcaggtagggctagggagcagcgcaggggctggagcattaaacacaggctggggagcgatggaggctgaggctgggaacccaggttggggcatctcaggaggactgtgaatcccagcctgcatgtttgggtcggatttggtcagcagtttggaacagaagagagatgtcatcagcataacacttttaggtgggaacctgaggtgttcagcgcaggctggaggcagggagaatctagaggtataatagaagcaggacttagcattgactgcagtagtctaggtgagcaataactgcagacagaaatggtgtgtcagcagtcagggacagaagaggagcgggagcagccatctcactaaggaagaatccagtaaccagcaaggatgagagactgccaggagagggagtggtggaggagagggatatttggcttgagtatctgaggtccagcgccccctgagctggaatcagattatacccagactgcactcctgcagtgctgcctggctcctgtagttggatggcaggggataggctccctcatcctccctcccgttccccaccttcccttccccaatgtccctgcatcctggcttcagcagtgatctctaaaatacctgcttgacttggaggcagcagctctgcctgcttattaaagtccctagaccagcaagaagaccagaaggcatactgctacacaagcacgtgacaagtccgcctccacccccacccctacaccccttccaaagtagcacaaatgccacagtgagccctcagatgggaaatactcaccagatggtgacagagaaagacacctccgcccttggagaaggaagacctgggtcttcagtgagcactgctgctgtgtaccagctatgggactttgcacaagtcattcaggctttctgggcctcataagcatttataaacatacgataaaacattttagttgccaacttaaaaatgtgtgagaaagtataaggtgtttcaaaattatttcaaggagtaaagaggcaagagttttgaagatccctgggcagggtgttggctgttcccagtgtggccattcatgactgctctctggccttatgaaacaagcatcatagtccctggcttgcctgcttcatggggctgtggagggtgaaattcgagcatggacagggtgcagagcccggagtggcagagcactgggtagactgtgtattcccagaatgtgggaaactggaatgaatcggtccagggatgccctcctgctggctgtcagcagcccctcctgtgtgtggctgtactgcttcagctcagtgcaaagggccatctcctccccagggcacagatcagctcaagctgagtaattgtcatctggtctttgtgagctcctacccccaggcctgagtgaggggcaggaaaagagcagacaggagaagtcacagacccttgtgatacctccagtctaatccagcctgggttttcagagctgtctggaaatttagggggcaggtgggagggggctgattaaggcagccctgatttgatttagagtgagcctcatttagtgactaattaagccatcttaaacctgtagggcttcccctcttcctttgggtattatttctttctgtgatgttctgaattcagaacaatcaaaacagtataagttagtgaagaagatattttttaataactacaatattttcccagaccaccatacactggataaagcctgtatataaaactttacctaatttcttaactaattgaatgtgtattatttaacaaagcagctaaaaactattctatgaagccatgtcatgaaatatttagttcaattatggttaatcctcatcttatttcgtcttataaaattttaacatttctacctcctattgcaaaaaaaagcatttatatcagcatataataaaacatgtctagatgtcagcttaaaaatgtgtgagagagtagagggtgtttcaaaattatttcaaggagtaaagaggcaagagttttgaagatccccaggaagggtgttggctgtgcccagtgttgccattcatgactgctctctggccttgtctgtcttgtaccttctatattagtttgaagaccttttttggagaatattcactaaagaatatcaatatctaccatttcattaaaaaagaaatgtggagtttgccttttcaagttggtttgatgcttattgatgttttcagggacccagcctcttcccatctttccataccatcctgtgtgtgtgtgtcagcctatcttccccatggtcacaaggtggctgcctagctccgggtattgcttagcatgagcagagagggcatgctgccgacatgcctctcctttatgacagagatcattctttctttgacatctcactggccagaatacgtggaccaacactggcaaaggagtatggaattgcatggctgcttaaaccaatcaccatccattccctggggctgggtatattgctgctggagcaaacctgtggtcctcctggcacagaataaggggaagatactctttggtggacagcccacattgcctctacacttgcacctcagtcccaccagacccactgaggtcacaggatagctctcctcatgtccttcctccttctctgttgaactcttatgtatccttcaaagtccagcctggtgccacctcctctgggaagctgtccttggttgcccaccccctcctttgtgctctctcagtctctgtccatcggcagtatcacttccctagcctgctgactccaacagttagctctgagcatggcagccccctccataccatcagcttctcaagggcagggacccttggcacactggatagaagtagcctggtgggcaacagcagcactgaggcagcaagctgtagcaggccatctgggaatggagtgggtaccacagggctggagcagaaagggcaggctgggcagatctgataaagtggctggaggccacatagcctgggcctttcgttccaggctgagcagagtgggttttgctgtctgcaggagggagctgtggaagggcatgatcacgaccaactaaggtgaccctcctcaccaggcccagggaagactgaggcctggaaggaggctctggctgcctctgggtcttacccccaggccacagtccacccacttagaggcctctgtgagttaaggtggagagactatgagctggtattgactgctccattccccatcccgagagaggagacaaaatcagtgaccttggaaatgcctcttcgtgcctcagtttcctcaccccataaaatgggagactaagagtacccactcgatggggtttaatgaagattaaatgggttaacatatatcgcatgcttagaacagtgcctggcacagagtaaatgctccataaatactgactctcatcagtttgttatcacagcctctggggagggcgccagtgctgacttatgctgttcgtgttaaatggggctgtcactgggtgagttgtggcatacaggcccctgcactgttcaagagaccccagcaacccttgtgcttagggctcagcacatagtaaggcctccagatcatatacccagctctactccatgtactggcagctctgcccagcccataccccaaatacgcccattaactaaagggccctgcagcctataaagtgatgctataaaggttcagtgttcagcctttgaaattcaaggcctgggctgctctattgcagtacttagcatgtccccatcctgtctgtttctctctcccatctcagggtgaccgaatcccaccatctgcacctgtacatgccagccgggatggcgttcatggctgctgtcacctccgtggtctactatcacaacatcgagacttccaacttccccaagctgctaattggtaggtgaggtgtaggagggaggggcagtaccttcattcatttcttcagataatgtttactgaggactcattatgtgccagctattgctctaaacagtagagatttggaatagaaaaagaaaaaaatccctgccttcatggagcttacagtctggtgaaggaggatagacaggcaaagacagtgaataaacaagcaaacaaataggtggtggggatgctatgaagaaaatcaagctgagtaaggggtaggggcaatgacaatgttgctatctacacaggatggtcagggaagggctgtggtaactgtgggcatgcagatatttgggggaaggtattccctgcaaggggagtgacaagtgcaaagtcctctgatagggatagatttggcaaagatgtcactgtgggcaaagccaaatgagcaaggggaagagtgggaggtgagggcaggcgtcaggagaggagcgagcaagagtcccaggctctgggcctgagagcctgggtgaactgtggcatcaataactgatgtgacagaggagggggaggtgggctgtggtggggataaagttttctactgggggcatatcgagtttgagatgtcacagagacagccaactcaagtgtcaagttgggctttcatggggaggtcaggacaggagctacactttcaggaggtgggccttgtagatgacatctaaagcttgagcctggggctggctgccgtggctcacacctgtaaccccagcactttgggaggccgaggtgggcggatcacccgaggtcaggagtttgagaccagcctgaccaacatggagaaacccccacctctactaaaaatagaaaaattagctgggcatggtggcacgcatcggtggtcccaggtactcaggaggctgaggcagtcaaatctcttgaacccaggaggtggagattgtagtgagctgagatcgcgccactgcagtccagcctgggtgacagagcaagactccatctagaaggaaggaaggaaggaaggaaggagggagggagggaagggagggagggaggagggagggagaagaaagcttgagcctggatgaggtcacctggggagagaagagaaaggctctgggaccagagcttgaggtttgctaacatttagagagactcgggaaggactgcccacttagagcttctgagatgttaaatactgcaggactggggtcccaggcagaagcaacaggatgatggttggtgtttactgagcatgtgccatggggcaggctccatgccatgttccttacattcattgtcccacaggctaattcccccagcctccttattggtattgttaatatccccattttccagtgtggaccctgaaactgagaggttaaaaataataacagtaaatactcactttgtacttactgtatgccaggccccatcctacctatgtgatatattaattcatttaatccttgcaacaactctatgaggtaggtaccattattattttccctttacatatcagaaaactgaggctcagaggttaaataactggcactagtctagctcgtcaaggggcacagccgggagtctagcatctgtgcaatctcctaatcatttctgagactgcgtgtctaagggccctcagacttcgtccttggggtaaaggtatcaatccgcaggtctgcctctgtgttggggttcagcctgtgtgtctaaggctggggctgtacatctggcagttagactttgttcacactatgtccttaagtcagactgatttttaggtatcacagcatcgaattgacatttggagtctggcacactctgtgctaagccagtgacatcatggtgttgtcagggagtacagggtgtttcttgcactagtcacaggtctgcctttctgtagaaggtgggatctgagctccattaggattatccaggtgatccccctacccctagcccaggggcccccacatgagtatgaatgggagctgggggaagcaggttgagaggggagatgttaaatacaggcttcagagagccaccctgcttccatttctgaagtagctccttgtctgtagagaacccttcattaaccagggcctggctgaccagtgtcctctggaaacaccctgtctggacatctgaggagttcattttctcattctccagcaaacacataatgttctctctttaaagcacaagttatcacccgtggatggatttgtccttttctaaggaacaaagactaactccctccattccccttgttggagttatctccccttgaaaggacactccacagagccagaaattctagaacagggaaaagtggaggggacgtgcctgtgaactgcagggacagaaggaaatgggtattgggagaatggccagccctccaaggggctgatgtctggcctgggtatggagtcccacagaaaggggacctgtgatgcagcttacattgtcccgtgagggaaccatgatcctggaacccagatgaggccaaggaaatgttctctgaaaaagtcatatttgagctgagaactgaaggaactaactgggagaagggaggaaagagtgcttcaggcagaggaaacagcatgtgcaaaggccccaaggcagaaggaacaaaacacattagaaaattcagaagaagaagagtggcgtgggtgcaaagtggaggggagctggactttgggttttgtttgcttgtgcccaggctggagtgcagtggcaccaccttgggtcactacaacctccgcttcctgggttcaagcggattcttgtgcctcagcctgctgagtagctgggaatacaggcgtgtaccaccacactcagataattttttgtatttttagaagagttgggatttcaccctgttgaccatgctggtcttgaactcctggccttaagtgatcaggtctcaacttcccaaagtgttgggattacagccgtgagccaccgcacccacctggaaggtcataccacagatgtttgcctttatcccaacagcaatgggaagttgtgtgtgtgtgtgtgtgtgtgtgtgtgtgtgtgtgtgtgtgtggtttaacatgtttaacataaaatttatcatcttaactgtttttaagtatagtgttctgtggcattaagtatattcacagccgggcatggtggctcatgcctgtaatcccagcaccttggcaggccaaggcaggtgaattgcttgagctcagaagttcgagaccagcctggccaacatgccaaaaccccgtctctacaaaaaacataaaaattagctgggcgtggtaatgtacacctgtagttccagctacttgggaggctgaggtgggagtatcatgggaggctgaggagagaggatcagttgagcctggaaagtggaggctacagtgagccaagattgtgccactgcactccagccaagattgtgccactgcactccagcctggacaacagagtgagaccctgtctcaaaaaaagaaaaaaaaagtatattcacagtgctgtgtagccatcaccactatccatctccagaactttttcatcttcccaggttgaaactctgtactcattaaatgataactccccatttctccctccttacagcccctgacgaccaccattctactttctatctatgaatttgagcactctaggtacctcatctaagcggcatcatgcactgtctttttttttttttttttttttgagatggagtcttgctctgttgcccaggttggagtgcagtggtgcaatctcggctcaccgcaacctctgcttctctggttcaagcgattctcctgcctcagcctcctgagtaactgggactataggtacctgccaccacgcctggctaatttttgtatttttagtagagacggggtttcaccatattggctaggctggtctcaaactcctgatcttgtgatctgcccacctcggcctcccaaagtgctcggattacaggcgagagccaccttgcctggcctatttgtctttttatgacttgcttatttcactgagcataatgtcctcaaggttcatccatgttgtagcatgtattgaaatttccttcctttttaaggctaatattctactgtatggatatgccacattttgtttatctattcgtctgtcagtgggttgcttccacctcttgactcttgtaaatagcactgctatgaacatgggtgcattgaggggttttcgacataatcataataattgctttatggagaccagcttggaggagaacaagatggggaggaagtgtggaaaccaatgagaaggctctcagggtatagcgggaatacagaggacgcatgatgatgcctggacttaggtggtaccacagggatggagagaagtagatagagtcaagctatttaggacgtgaaatagacagcatttgttaatgggagaggtgtggggcgagggagaagaatagagggagaaggaggagtaatgggagctcaccagcagcccccatgttatgcctctttccttccttttccctcttctctcatcaggcattcagcttttgctgagtacttctgtgtctgacaacaggctgagcactcagcactgcaggacaggactatgcaaaaaacctctgggcctagtcctgggtgcactgctaattccctgtgtgaccttgcacaagacatccaagctctctgagcctcggattccccacctgggcaggaagagtaagtccctgcctaagtcatagggttgtaatgaagagcaaagcagaccatatctgttaagtgttagggacaagacaagcatgaggcatattttcaagtctcggctcctgtaggcagctctcactaagggctaaagggcttctgatgcctgggatagaatctgtccggcagagtggagtggaggcagggggacagccttcagctgtggaattcctccagtcctagagaccagcctgagctgggggacattattccagtcctgaggcatgagagcagaaggccgatgcttctgccctccatcctaatgtcctcctgcagggacccaaggtggatggcatcgatccccccgggtgagctcagccctgggcgcatggtggggcccaacatctcaacctgtttcctaaccctgagccaggcaggacagatcccagatttgtgcccaagagatgctctggcatccatgcccaggcccacatagggatagagggcagggtgaaagtctctctccctcactcgggtcctctggagaggggctctgtgtcatgaagctgaccttatccgcatctggtctaggagggaggagggaaggagctgccagtgctaaaatctcccccaccctcaaagggggacttcacaggttattgctggttttggttgttggaagctgacagtgatttattggcagattgaagtgagtgtgtgtgcgagaatttaggatagaatctactgatagcttctgaggtttaccttccccaggtcttaaatctggagataataaaaatataacagctaatgtccaaagagcacccgctgcgtgtgaggctcactgcactaaatgctttccatatgtttctcacaagaaccttctaggtagcactattatgattcccacttaatggatgaggaaactaagctctagaaggctaagtgactaatccaaggtcacacagctattatgtcacaggctctgagcccaggtgtatctggctgcggagccaccaccactaacccctgtataacgctgcctcacagaactgtggctggctctttccgtatcccccatgcccctgctccatcatcatgctgtggtgggctctgaactgtgaggacagggatccaggctttcaccctctctctgtccctagctgccagtgcacttgggcaaggtcacatcctatttctgggcctcagtttcctcatctgtaaaatgaaaggctggattgaatgacctttaagatttccctcacttggaaattccacaagtaagtcattatagcatggagcttgcatgcatgggctccagcgtcaggccagcccagctctgccagttaatgggtgtgtggccttggatctgttacctaacctttctgagcctcatttcctttgtctgagaaattgggggtgacggcagtgtactttctttgaaaagttatggtgaggaatagataagatcatgtgtttaaagtgcttacttggcacagtgcctgtaacttagttaaattcaataaataaatttcccattcttcccatgatcatttatttttaagggacatttgtctgaccagtttgatttatgagattattggtgtttttcatgaatgttaagacgtacgtgcgtcatcttagagtcatgtactctgatatattcacacgtgcacatccacttactcggaaatgtacacacccaggcacgcttattctgtctccttctctgccacatacttgcacacattatgtgagtgtacacacatgatgcacacacgtctctgcgatcttccatctctcctcggcagccctgctggtgtattggaccctggccttcatcaccaagaccatcaagtttgtcaagttcttggaccacgccatcggcttctcgcagctacgcttctgcctcacagggctgctggtgatcctctatgggatgctgctcctcgtggaggtcaatgtcatcagggtgagggtaagcaggccacctgggccagggtggggtgggaagcagaggctctggcctctgtcctgccctgggttcaggcccccaccctgcttctcagccaaactgagaagggatcagcttgttttacccgcccgtgtaaaggggagtggggccgtggcggaaatttcaggatagacactgcatctggcccacgtgtgctctaccccagggtcccagagggagaggggggtgatgggtgtgttcgctgaggttggcggatgactttccgtagaaagggaagataagcatcaggcactggcctctcctactttctttcttcgggggtgggggactttgctttaatgtattcatatcgtcacgctggtaaatgaatgagtaagtgttttgttttcctttctgtttgctcccgcctccctctctcttcctcaccccagactccaaccttccccttcccctgcccctacctccccaggcagcccagactaatgaactcgtttgtctttcccatgctttgtttttattagtataataccatatgtgtctgtctaaataaatacctattcaggttttttcctctcaacacaagtgaatatgtaggtttcccccacggtatttatcttgtaagaatgggatcatattatgcagttttctgcactgtgcttttctcacccaacaaatatctcttgggactccctccaagccatctgatatggctaattccgttttcttaatggctgcataatattccatcgtatggatgagccataatgtgttcagctatttctctatggatgggcatttactttgttgccaagttcttgccttcatgaataatggtgtgttgaacatacttatatatttatgtattgctgcttttatttctatgggagagagtccaaggaatggcgttgctgggtcaaagggtctgtgtattttaaattttgatcagtgttacatattgccttccagaaagactgtaatctgccagcaatgagtgagaaaaccctttccctgccttccaaccagcagtgagggctacagccctttcgaacttggactgcctgcatttctctgactcttctgcttttagttggtgatctgcagggcacaaagctccttatgtgtccccccatccagtgaccctcacaggaaccctgtgatgcaagcaccatcccctttatagatgaggaaacattttagatgaggcttgtccaaaaacaccttgctagtaagtggaggaggcaggattcaaaaccaggtctgcatgacttggagttctgtgaactgtatatgaaacatggtggtatccttagatctgtggagaagatagcatatgagagattcctgctcctccccaacccaacctaaacccaacccagcctagccatggggggttcaaagtcgacctcaatgagcagttacaaagtcaggatgccctgacattggtggccaagaagtgttggggaatccttttcctggtaataattacaggcgaaagatggccccatctgttagagatcaagtgtggaatatcacaaccccagatccttgctggggcaaggtagggagtggtgagaagttggacttacccatcccccatggcccatgtgccccacagagatacatcttcttcaagacaccgagggaggtgaagcctcccgaggacctgcaagacctgggggtacgcttcctgcagcccttcgtgaatctgctgtccaaaggcacctactggtggatgaacgccttcatcaagactgcccacaagaagcccatcgacttgcgagccatcgggaagctgcccatcgccatgagggccctcaccaactaccaacggctctgcgaggcctttgacgcccaggtggtcagtgggggcacagccacaccatctattcactgccttctggtttagggtcacagagagggacctcaaagggcattaggtcaaaatcctggtgggacaagaggggaaactgaggctggtgaggggaagaagcttgccttaagtcacacagtgaaccagggacaggtgcagggctgaggattcataggacaggcacagttggaatggcccttaccgtttaggtcgtctagtccaaagtccttatccagatggggaaactgaggctctgagaagggaagtgaccccactggactctcacatccctgtgctctttcctctgcagcttactgactataaaggttggagtgttcacttgatttggagcaggggtgttagtggcctgatccttatggtaactctatgagttgagccagacaggaatctccccatatcactgaggagcaaattgaggccctgagaaaggctgtgacctgcccagagctggccacagctggcaggcggcagaggcagtctcctggctcccagtccagtgctccttcacttcctctgccctcgcaccagggcagttgctgaggcagacacggtggcaggtggtaatgagtgagtgtggcacatggccacctcctcattccagtgctgtgctcatcacatagtccctgaccagctgtgtgaccttgagcaatcatctggccttagtttccccatctagaccatgttggtgttgatagggccctcccaactgtgcacttgctgattccatgatctcttcctggagttcacctatttgcagaggatgtgaccactgggtttccccagacaacaggagctaggggcatcctgggaggctaggcccagccgtgaattagccctcaggcactctgacctggccatggtctctctgggcagcggaaggacattcagggcactcaaggtgcccgggccatctggcaggcactcagccatgccttcgggaggcgcctggtcctcagcagcactttccgcatcttggccgacctgctgggcttcgccgggccactgtgcatctttgggatcgtggaccaccttgggaaggagaacgacgtcttccagcccaaggtaggcagccccaggggtagggtaaggcaccctctagatggttttcagttgtttctgagagtgcaacaggccaatgtgtgtgagccatggccacactggagtggctcctcacacatgcgcaaagcccatagcagtatccccaccacagaatactctacatctggtcaacagaaatgccagagggcgagcctatgccccaagggtatcctactctcctctcaccgtcactaccatagtacctctcccggtagttaggtcagtccgaaaactgcaggaagtgcttttgtttgtccagtgtctagagcttctgtgacttggatttgttggctttcagttcatgtcatcttagtaaactctttaaaagttttcaagatctgtcttcttcagtcctgtaaaggctggcacttgagctttctgcaggggcatcttgggagctactgtcagaggagagagaagtgggaaaccctcacgagtggagctttgtctctccccactccaaatttcattcaaagctgcccgtagttttattaatatgttggacttttccattaaaatttcttttttaagaaaagtttccatggcttaaaaaacactggagacttattagactagattatatccaatggccttggcagttgtaacgattctgcaaactgaaatttgttggagctagaaaacctttccccggggttatttgccctgcgtggggccgtagcatccacttcgggggctgggcagactgtgctctgttgtctgtttccttgcagccgtttaggtttaaatggccacaaaatgaaaactttttcacccctaataagtttcagagttttagtttccaagtgaggatgtcattataacattttaaccacagacagtctgaaaataatgcagagaatggggaattagggtttttaataatttatgacaccctttgcgtaacatttgttcatctcatgagctccaaaatcgcagccagcagttaatcctcaggaggtttatgttcatttttctggagacataattagtcagctgaacagttttggccacagatatgagatacgttgagtctgatttatgcagcaaactttcattgaacactgctgtgtgccaggcctgggttgggctgtgggaatatgaaagcaatagttatgatgaggatgattaacaatattaacagccacttactgaccacataatacatacctggctgtgtgcaggagttatccatgtgttatttaatccctaaaactatcctttggcgtgagtatattttgcaacatctttactgtggtatacctcaaatactgtacagtttatgagatgataggtattcttatccccattttacagatgagaaagttgaggctcagaaagtttaagtaattttccccagggtctctcagctagttaataacagaggcagaatttgaacacaagactcactccacagtctgggcatttacagccaggaagctaaattgactattattatcaagccatcacctctggctccaaggattatgaaatccaacagtgaggagagaaatcaaaataaaatacttttatgctatgtgttacatgtgactcttaggaggaatattcagggaattgtgggaaaagatagtgattaacttagccagtggtcatgaacagcttcatagaggaggggatgtttgaaaggggtcttgacggatgagtaggaatttgccaggctgccatgggaagatttcttgctcaaccaagaatgcaaggaccacttttgcttatttaaactttgatggcttttgaagccatatctggctttttgagcctctctactttacctggcccataaaagagaggggaagcggctgcttctcttgtctacaggagtgtcacctttggctctagcctgaccataggctaccccagaatacccccattggcgatcctgaagcagcatggagccagttgttaatatcagggggaaatggcacaggccagagcccttatcagagtgtccacaccacgctcttcttcctgtgtttcccaaaacccttgtgggattctgctaaggagagagctctgaggcaggacgtgccaaagagatggcgaaagcacttagaattttagttcatctgaacgttatcattgccgtttttttctctttgtttatacacaaaccctggggtttattaccgtctcattggaatgctcttgtcccagttacttagcacacaaatccctgagacagatggccctgcctcagtggcagtgggccttatcagatttaatattttttccctgcagcccaaacacaatcagaaaatttccgacacagaaacaagagttgaaagtaaatatagtctccagtgtccgcaacaaagaactctccatcatgtggttgcctgggatgtggcttaattctcatgtgggcttctgagctcagaaaatgggggaaagggatcatttactgagatcatttggttcatctcccagcccccaagccattctaatccagagagaaccgagtgctattctggtctttatgaatgacaaagaaggaagctccctagctacatgttgcagtgtttcacagtctgggagaggaagccgttttttctgcccagcctgaatccatcctgcagcagttggcacagcgaggcacctgtggtttattcatcatcactcttccttcctaagatactcagagttggcaagaaacatgtcatccttggtatccgcaaggacgaacatttctgatgtcctctttagttactgaaagtgtctgtgacttgccagatctttgatgctcctgtcaccccgctgccactccccagggaaagctgggacccaggttgggctctgcctatgatctatagctctttccagcctcctctccaacccaacccctactcccaatctgtcacctcccatggatgccactgatctggctgaaggacaagagaattagattcataatgagctgctggtgtctgaaacctgccagcactgccctgggctatcagttgagccaaaggaagaaggaacagtctgggtttgatcgaagggctaaagcttcaaacagcctctaagtctcagtaggaaaatgtgtaggtttgggagggtgtatgtgtttccgaatgagttcccctaagaactgcttatggttctatatgtgtgttctgtttgtccctgtgtcttttggtgtgtctttttctgcgtgtgtgtgtgcatgtgtgtgtgtctatgcccccgtttggattgccatatttgtggctatcattatgagtgacttaatgagtgtatatgcattggtgtttctgtgactttgtggttttgatgcatgggctggcctcttcataaccatgtccatgcagctggtctggcctagagtacctgccttcaattcactagctccttcttggccatcaagactctgctcaaatgtcacctgctccagggagccttcacctggttgaattagatgccccttatctgtgctcacataacatcctatcaaagcgccctgtttctttccctgacttgatcctctgtcccctattgcctgacctctgtgtgcccagcactcagcccactgcctgacacccaggagatgcacgggaaatggttctgcaaagaaggaataatgcagcaattactatatattgagtgcttacacttactgttttttcacatgcactgttacattgacttctcataacaactctctgaagtcccttcatagcctcaccttacagatgaggaaactgaagctaagagaggttgaggaacttacctaaggacacagtggctaatatatgatgagtcaggacctctaagtccaggctcttaaccaccgtgtcaaacagtcttgtatgaatgggtaggtgtgttggtctctgggtggccaaagataattttattctttacccagggcctcccggggctgggacctacggacaactcaccttttgacacctgccaaaataggaaacaagagtccaagtgatcccctctcctttaagcaccagagaacatgtgaaggggacctttccaatcatacctctggcctggcagagacaatggggctccaaactgtagagtcgggagtgctgggttttagtcctacctctgcagctaactcatttattctcctcagcagtcacattctgcaagcctcaaatgcaaaatgtgtaataacttctgtagaaagtacatgggggcatgaagatcattggcttgattgcttttaaaaaatcggtattgagcactactggggaaatccctggaaacaaacacaattcttccctgagagcttgtgaaaatgcaagactagggcctatgattttccaaagcattttcttccaccaagtgtcaggttgtaggtccttggtcttttctctcttgccttggtacctgcagggtgctgaccagtgctatcatatcccctccccgtttcctaggaccctcttctcggtagactccaacagggcctgccttccttgggcagcatggcaggcctcttggctagtctagtacccacttcttttttttttttttttttttttggatggagcctcactctgtctcccaggctggagtgcactggcgcaatcttagctcactgcaacctctgcctcctgggttcaagcaattctcctggcccagcctcccaagtagctgggattacaggcatgcatcaccatgtccagctatttttttgtatttttagtagaaacagggtttcagcatgttggccaggctggtctcaaactcccgacctcaggtgatctgcctacttcagcctcccaaaatgctggaattacaggcatgacccaccacgcctagtcaggtacccacttcttaactgaaacttagctattccaggttctatcccttttaaaccaactctttgaagagaggtctaataatgacccaatgacttatagctgcagtgagatttttattttaacaggtcacaaaattctcaatccacaaaagtagatttctgaccctaggttattttgttgggggcggagagaggaagtcaaaggttttgcagcctttagagctgcaaaaccagaatttgttgttttgttaaaaatgcacaaataccgacgagtatatttaagtaacacccatagtctaacgaacaaacatgatcagttggcttttccagccctcattctccagcctgtgtgttttctgctcattgtaacacagcgtgtgtgtggcattccatgtttctccagagctttcatgagaatcagtggtcttggatgcatagtgttcccatgagtaccttaattacctaaccattccctgtggttggaaatttatatgggtttttgcattctccttctgctctgaccccaaaataaatgtctgtgttcatacagctattaccttatgtgaaattattttctttgggataaattctcatgatgtgttgttgctttaaaatagtggactccagtctccagagctgcgtctctgcagaggacagtgggacagaagaatcccagggcatgttaaaaaggaccgggtcttcctaaacccacatgcctatatttctgacccagtaccagccaggggggcaagtttccatcccccacaagtcacaaacctgtaactgacactaggatgcttaaggtcaaaggcctggacgaggcctagacagtgggtctggggtagtgtttttgacatcactcaggttcatgttcacatgttgtccccttaccagcatgtgaccttgggccagccactaaccctactgaaactcctttttttcatgtatgaaatggggctaataatggtaccctcctcattagggtattgtgaggatagagttttgcacctgataaatattgtctcctgccccttcctcccctggaaattcaggtctctccctgcagcctaattttaaggcccatttttctgcttccagcccacccctgcccttctaccttcgacctcctccctctgcctctccctctggtgcactggcaaatgggacagagagcctcggtagggccttcctcttagagtcttgcacgcatccctcagtggtctccctgtggctgcttcctgctgccaccaacagatacagacccctgtcgcacagatcatggtagagacagtggtgagcaggaccagacagctccagggagcagtgagggctggcttagagaacctctgttaaactgagaggccaccatcaggaagctctgatccaagatccaggaatccctgactctagggaaaggcctccaatgagagcctgggccctctctgcctgattctgattgtggatgtgccctcaaactccttctcatcactttgttccatccctctttaccctgcagcagctcccacaccctgccaaacaggatgcacagtccagggcagtgtctgagaaagagcagagatctgtcttcatggaaatattgatgtggctctgctggggagcaatggatttatcaagatcaaagttttcctgggagttattgatgcttaatttggaaatagacacactgttgatccctggtatctttagcaacaaagttaaaatgtttgtttttcttcactggttgccatctgagatcttgccggaagtacacaagagaaccttaaatttaacaggaggccctgggagcccatgaggctggcgggcttgggtctgaaatcttttcagtctcttgtaagtgatgagctctcattctctcctgagagctctacggtgccatgttttccactggccttttctgctcagtaattgctacattacaggctgttggtaagttcggaacaagggagctgctgattccatttctgtagcagagaacatgcaccgtgagacttgttgtaccagttcaggttttaggtgctctatttattcttgccccattcagaatgctctcccctgggtctgtggccacaatgctaagagtcatatttatgggcctgcagttgtaattgggccccattctgttcccccaagtggaaagatgaacagggtgtaagcaaccttccctgtagttagaaaaacgtttagttggatttatcagtctgatttttcactcataaacaattgcacaagcctttgcaagcccagagggtcttgtaataatgatggccgtggtccattatggcacagtgatgtgttctacggtggtcattttgctggcaatgacagtcacctctgaacttctctttccaacagacacaatttctcggggtttactttgtctcatcccaagagttccttgccaatgcctacgtcttagctgtgcttctgttccttgccctcctactgcaaaggacatttctgcaagcatcctactatgtggccattgaaactggaattaacttgagaggagcaatacaggtacttggatgattattttttcactttgccataagaaccattattaggaataatgtccatgagtgttattcatcctcatggacactcaagaataattctgctgtaaatttattttttgttgcccattaacgatgttttaaaacagtaaccattgacaaggcagtgtgggatagtggaaaatatcttgggctgaacttgggagacagtgtagctctggctctggttctgccttggactgggtctgaaaatccagctgctcagcccttggcttgaaagtggtagacgtcactaattgatcacagcactctttctgaccaagggtaaatgcaaccttggaatcctctctaagtggctgttccagagttctgctaccagacagtcttctttgggtgtgaaaaaaggaatgtgcttgacatacaaggtctagatagcctctaagacagggtcccctctaagatggggtattggtccatggcctgttaggaactgagccacacatcaggaggtaagcagtgggagcaagcattactacctgagctctgcctcctgtcagatcagcggctacattagactctcataggagtgcgaaccctattgtgaactgtgcaggcaagggtctaggttgtgtgttccttatgagaatctaatgcctgatgatctgaagtggaacagtttcatcctgaaaccatccctctcccccaggtccatggaaaaattgtcttccacgaaaccagtccctggtgccaaaaaggttgaggaccactgctctaagttctatttgaacccttaagtcttgctcactaatgagagtgacctatttggtctgttgggtcacttaagtctaggctcttggtcctgccttctgtgatttccttcttagagtttctggaaagatgatcaaagccagggagtgttcagggcccctctgaagaaggtgatgatgagagttgtccaagtcccagggtcttcactaggattttggttcagctatcagactagagagacatcctgattgagagtagtttaaatgggatagaagtttgtttattcttcagatagagtcagggctgacacaggagctactcaatgatcagagacctggcttcttctgtcatgttgctctgccagccttcttttgtgacttttgtctccatagccatggtgggtattgaaactgccactatatttacatttaaactagccagaagaagggacaagaggagggaacgcattttccttttaaaatggtaatacctgatttgcacataccctctcgcatcccattggtgagaaagtggccaaatggccgtatctagagagtctagaaagagcttggtctttattcttgacagctatatatgcactgctagaaattctctgtgcaaagaggagaatgggcattgggaataactagatgcagctatgcctagtgatgtccatgaagttgtggtaaaatcctgaagctaccttgttctttggaaatgttcctcagaatcattaacattagtcatgtgggagacaggagaagaagctctgcagaaaagggaccgagaggacaaggatatagcttgggctggggacaatgtcagagtccaaactctggctatcttggaatagtctgtgtgaacggtgccctcccaagttgtgcagtgcacaacctgtgcagctatatatggcaaccctgcccatccccagtggtttctcactgggaaagcagagtatttcctcagggatgtcattatgtgacaatagtggaaaaagcccaggaaaatctaagaccttctaagactcatgggggcccagagctgggaggaaccaagctgttgctcagttcagaaaacttctctagaaatcccagcctctcctcacacccctccagtgacaggcagacttgcaccaccacaagcaacagccacttttgtggttgggcagttttgtaattaaatatactaatgtgtgtatgtcataaattacattttccaattatgccaaaagagccaaaaatggttttttaatggttagcatataatcgtttttatcaaattgcttgaatctttcatgttaataagagagattcattactatgccacaaaaagcaaatactggcattaattatagaaacaaattaggggggtggagcgcaatggctcatgactgtaatcccagcgctttgggaggctgaggcgggtggatcacaaggtcagaagtttgagaccagcctgaccaacatagtgaaaccccatctctactaaaaatacaaaaattagccaggcatgttggcgtgcacctgtagtcccagctactcaggaggctgaggcaggagaatcgcttgaacccagcaggtggaggttgcagtgagctgagatcgtgccactatactccagcttgggcgacagagtgagacttcatctcaaaaaaaaaaaaaaaaaaaaagtggctcatgcctgtaatcccagcactttgggaggccaaggcgggtggatcacaaggtcaggagatcgagaccatcctggctaacatggtgaaaccccgtctctactaaaaatacaaaaaaaaattagccaggcatggtggcgggtgcctgtagtcccagctactcgggaggctgaggcaggagaatggcgtgaacccaggaggaggagcttgcagtgagccgagatggcaccaccgcactccagcctgggcgacacagcaagactctgaaaaaaaaaaaaaggaaagaaagaaggaaaggaaaggaaagaaaggaaaggaaaggaaggaaagaaagaaagaaaggaaagagagagagagaaagaaagaaagaaagaaagaaagaaagaaagaaagaaagaaagaaagaaagaaagaaagaaagagaaagaaagaaagaaaaagaaaagaaaggagttagggagaaaaaaaccctttctttctttcttttggagatttccggaaaatgtacccttacggatgagagcctgtgtcttcatgggttagagaataaccacgctttgtgcataaaaagttattaagcacaattcctgaattatacataattactagctgtcagtcagttgtgcatttctgtgtatgctggtcttcacttaataagactttatttcacagatcacttggtgtccctacttcactgaaactaggtgattatcttttgaagtctcatttcacataacctaggaggtatatagatttctttaaaaatgtcattgccattattttaaaccttacccatggtatatataaacttacagaaagacagaataggttcattattttaaaccttgcccatggtgtatattagctcacagaaagacatagaataggttcctgccttaagaaaacctgacccacaaaaaagcctgggtttacacaaaagaggaattaagggcggggagcccaccttacaacagaatgaataatagaattttatccaagagcaggcatcctgaggacatttaagacccggatgcatttttccttgttcaagagcacacatccaaaaattgcagtctttctgcgagtcatgatcactctgcacataaagcgtttaggttcagagctcggggaggccattaccatggctgctctctgtctgccctgtgagggtccttggggtggctgcactctggggatggtgctggggctgactgactcacgcggtcgtgtaacacatcagaccttccaaagtcgaacccttgttttgtttcaaggctcaattatgacaggacttggtctcagagcagatcccctccctaggctggagaaggccactttaaaacagatggcctgccccacttcatcatttttatggctctgatctgtgttctccactggcctctggtaaatcaagaatacaagtggacatgaagatctgctttaaaaaataaagaacagaccgggtgcggtggctcatgcctgtaatctcagcatttggaggccgaggtggatggatctcctgaggtcaggagtttgagaccagcctggccaacatggcaaaaccccatctctgctaaaaatataaaaattagctgggcatggtaggcacgtgcctataattccagctactccggaggctgaggcatgagaattgcttgaacccggaaggtggaggctgcagtgagctgagatcatgccacttcactccagcctgggaagcagagcgagactctgtctctaaataaataagtaaatgaattaaattaaataaaaataaagaaccaattaagtcctgtctacaggaaaaggccttacttgctggagaagtagcttgctgtgctggagtagactagtaagttggaacggtgatacagtaccaccttacagagctgctctagggcaccatggggactgtctgagaagcccctggcacactgtaacaggtggcatctggtgtggtgatgatgatgagaatgatgatgaatgtgaaacactctgctctcatttctagaccaagatttacaataaaattatgcacctgtccacctccaacctgtccatgggagaaatgactgctggacagatctgtaatctggttgccatcgacaccaatcagctcatgtggtttttcttcttgtgcccaaacctctgggctatgccagtacaggtactagatgggctgaggggaagggaggggggcagcaggacacacaaccagaatctgctggtccatggccagtaactaggagcacaccgtcttccactccatgcttgcctgtacctttcacacacttggctataccacaggctgtacctctgggtccctcctgtcccatactctgcaagcactgaccatctctcttaatgaccagagaaggcagtatcattaagactttaaaaatggagccaactttataaactatagaaaaatcaagccaggttcaggggctcacacctgtaatcccagcactttgggaggctgaggcaggaagattacatgagcacaggagttcaagactggcctgggcaacacagtgagaccccttctatgcagaaaaaaaaaagaagaaagaaaagaaaaatcgtacatggaatgcccacagatcttaaaagctatgttgtagcaaaatatttaattacatcaaaaagtgttagtgatgtatttttaagcaaaaagagtaagttacaaatagtatatgttgtatgcttactactaaactggaatatatgttatgtatacatttgtacagattcacacatgaaaaagaattggaaaatcacatagtgggattataagtgatttttattttctttatgtgtttctaaattctctaataagcgtgtataagatttggaaatcaacaacatgatacttttagcctaggcaacaaagtgagaccctgtctgtacaaaaaattagctggaagtggtggctcacaactatagccccagctactcagaggctgaggtgggaagattacctaaagtccaggaggcagaggttgcagtgagctacaatcacaccactgcactccagcctgggcgatagagtgacaccttgtctcaaaaacaaacaaaacctggtgttttttagccagatgtggtggtgcgcccctttagtcccagctacctgggagtctgagatggaaggattgcttgaccccaggagttcaaggctgcagtgagcaatgatcacgcccctgcacttcagcctggacaacagagagactcctgtctcttaaaaaataaaaataaaaacgttaaaacatggtatttttttaaagcaagacaacctttggtgctggctcaggaagaggtacattaccccccaataatcagaggagaatcgtcagcatgattgatctgacctcgggcttcatgtgtcccatctcccacccggagctcttccaccacagagtctgatcctgtcctatgcctgggactaaatcttcaccctggtgttcaggccagaaaccgaaatcccagacccattcccagagggcgggaaggttccaccgggagagcttgatgtagcagaaagtgacttgggtgagacaggctgattcaaatacttaacctctctgagccttggtttctttatctatgaaatggggaggctgcccaccctctggagttgctatggcaattcagttagataatgtaagtaacacagcaggcagagtggcccccagagtcttcacttcgtaaatatcagatccctctaccttgcacatgtttggtatgagtgaggtgttaccaatccagaatccattgcttcttgggataaagattccataaaccttcatctccagtgatttgtattggtcctccttacttgtaaagcttagagtttaaaaatattaaaagaaaaaaaggggagaggctcccacagggacacagctagacaagatgagatgcagggaatctgatgttcttttttatgggaacagtcatatatgccatcccccattaccacctacccatgcccagactgcccccgctccattctgccaagacagatcaatgactataaaagctacaaaagggcctggagatctcatctagtttagttaccaaccaaccttttatgcacaagactttctaagctgggtgtggtggctcatgcctgtagtctcagccactcaaaaggctgaggtaggaggatggcttgagcccaagagttcgagtccagcctgggcaacatagagagacctcatctctaacacaattttttttttgaaacatgaaaaatgaagatttctgaccatgcttctctcattagttaacactttgggctgtgagggtctgatgcagagagacacagcctgggaggatcctaacatgtacacagcattcaaaaggctacaagacactttctgttgtgtccccttgaacaagcagtttgtaagattttgttggccaggcatggtggctcgctcctgtaatcccagcactttgggaggctgaggctgatggttcacctgaggtcaggagttcgagaccagcctgaccaatatggtgaaaccccgtctctactaaaaatacaaaaattagccgggcatgatggcgtgtgcctgtagtctcagctactccggaggctgagacaggagaattgcttgagcccaggaggcggagactgtggtgagctgagatcgtgtcactgcgttccagcctgggtaacagagcgagactcggtctaaaaaaaaaaaaaaaaaagaaatcaggttttgtctactaaacctgctgcacggttaccgttactagtactcacagggtttgttgcacatgcatcgttgctaatagtgctaactaatattaacagcccttgccctatgcctggccctgtcccagcccccctcccttgtataatttaacccttgcactgggggtagagattttcatatctactgatttcttacctttgctcatttatcatggagtgtcctttggttttctgtgtttgtatatacctttaccacttatagatttgaccagcactcaagaaccagtgttactcctgggagttaatacaatcccagccccatggcaaagaaactcatgtggttaggattctgtgtgcagcctggttagccacagggcacgtaaggctttttataatattgacatgagtgcagaagccccattcccgtgtaagccctgagggctcttgtttcataatctttttttggtcacatgcacacagctttattgagatataacccactcatttaaagcatacaaatcagtgggttttagtgtcctatattcacagagctgtgcagccatcatcacaaatgtggaagttttcatttccccaaaaagaaacccgtacccattggcagtcactcctcatcttcgcccccagcccttggccaccgtttatctacacatacttttgaaaggctagtgaaactttctcagaaaaataaatgcttgctcaaacatttgggctataatttcaggggcttcatgggtgcccccctgacatttatcaagaacaccaggttaaggaatttagctataatggaggcctctgtgtttcccagtctcctgggtatcagaggcccagagagggcaggtgccttaccctgggccacgcagtgaaccagtggcagcaccatactcacacatctcctttctgcggttccccagtgacagagttctcaggaagctttttcatttattttctgagaggagggtaggccatcttgtattgatctccaactatatgccagccacaattctaggtgcttatcataaaggttcatttaatcttcacaatagtcctgcagagtggacagagtccttcagagtgggcattataatcaccattttaaagatggagaagctgaaaaccagagaggttaagtaactcacccaagactgcacagcaaaaggctggggctttgaaactcagggccacagactccaaagactatgtcctccccactatgctagatttttttcctaacctgtgaataggagacaaaatagtccttttatttctcacagttgctttgcacactcagaatccatgatttcttctgcatgagggccattcagacctgtgcagaagagagtaatggaccaaggagtcttgggagcacctaggaggaggggatgggggagcatgaggaggagccagggaacagcagcagctgcagcaccagctcccaccccagcctctgccagtctcttggaggtggtgtgggtgcagacaccggctcacaaggtgccctgttagtgagcttggggtgccatgggagccttcttgttgtcaggcccaacccaagctggctgaagaacaccctgatggcctccatttgagcacaactaatgaaggactggatgccagagataagtccaggagggtgatgctgcagggcaggccagggaagagggtacttcatctctatcatggtcctctgcccatccatgccagcatctaacacctgttaaacactgggaggcaggtggtgaaggggccacttcccagcctctaagatacctcctaagccaggaggcattctgtgattaaattacagggcctcccacttactcctttatccttgaggcggtgctggaagcttaatgccaatctggtgtagggctctgggactacaggaccaaggcaagcagtcctttctctctctctctctctttttagctaaggaagccagcacatctgttctttgagaaaaagccctgtatttagaggtgtctgcctttgaaggcaacctgagaaactgtcatcttggcgctttggggactggccatttacacttctcataaatattcagaagtaggcagtcatttacataaagctaaatgcagaaggaattctcttttcagggaatacctggcagattcattaaaaaaattaaagaaaccaagagcataagaatgaaaagcgaattctcggaccccaggctggttttttctggcatgggtgcagtaactttgcctctttgctcagttatcacttttttccaatgacagtaaccataagccctgagagccagcaaatagaacaaaaggtgctgtcacaaacattgtgcaatctcatctctgagatttccatctggaaaatagactggagagagttaaggcttcaaccagccttgcagataaatgcagttagttaccagcccagcaaccctctgcttgcatgagagcccattatgctaacctccttttgaaattgctttgtttctcctccttccctgcactccactccccaagataatttggaaacctgggcaccaaggcttgtcccactctaggggactggggaaacagggattttgccagcacctcctggcagggcaaccatcaggtcaaagggacctgacccatgaccccttcctcagatcattgtgggtgtgattctcctctactacatactcggagtcagtgccttaattggagcagctgtcatcattctactggctcctgtccagtacttcgtggccaccaagctgtctcaggcccagcggagcacactggtgagtgcccaaaggtgtgtgtgttttgtccctcttcccctccttccctcgacagcagcaggtctcctcccacacacccacactgtcattgactttgactttgactttgagtaggccacttcacctgtccaggcctcagcttctttgtctgggaaatggagtcaatgggggaggaggctgcctcccggtgaggacaggaggcgggcatggcagtgacagtattgacactcaggccttcctctcgggtgggagacggagcagaagcctctcccctctgactcggggacccctgcaggagtattccaatgagcggctgaagcagaccaacgagatgctccgcggcatcaagctgctgaagctgtacgcctgggagaacatcttccgcacgcgggtggagacgacccgcaggaaggagatgaccagcctcagggcctttgccatctatacctccatctccagtgagttcaccccacacagccagccctgggtgctgctgcgtacatgcaaggagagggtgtcagagctcgggtaagagggggtgcagggacagaagcaggaggccttgagattatccgactcagtaggggagcctcaaactggctctgatagctaagctcccagaaatcaaagtactcttcattcatttatccaacaaacatgcatggaaagcctgctatgtgctggacactgtgctggccctcaggatacagtgatgaggaagagagatgaagtttcattcctcatggaactgatatgttattgacagacagcagcaagtaagtaaatgaccacagttttgaactctcctaagaatgaagactttttagtaagtcagactgagctgtcattgccctggggaagctacaagaaagcttccatccacttggggctatgcaaaagaaaaagactagttatccttaaatatcagaagcccaggctgaaggtactcacaggtgtagggactgaatttatattaaccaagtagtttgggaaccccaagccaaggaagaagaaaaagaccaaaactggtaaaagtcctagagtcccatatacttgaaaccattttactgagaatgtaaaacttttttttctttttttgagatggagtctcgctctgtcacccaggctggagtgcagtggcaaaatctcggctcactgcaacctccacatcccaggttcaagtgattctcctgcctcagcctcccatgtagctgggactacaggcacacaccaccacacccgactaatttttgtatttttagtagagacagagtttcaccatattggccaggctagtcttgaactcctgacctcgtgatccacccgcctcagcctcccaaagtgctggaattacatgcatgagccactgtgcccagcccaaaagattttttagaaattgaaattttagttatggaaattaattcagtgaacaatggtcccctggtcagagtgagggcttacggaggtcaggtgatccatggagtcctggcccaagtttatctcacagttggtctcgtggctccgtggacccatcccatggtggttacttcccaagtgcataattgggatgtagatatttagcaaccagctgacttcacactagttccctgacctgtccagtctaagagtcattatggccaagtggaagcccctggaaagaagaaaacaaaaaagaaaccaaaacttactcagtgcacaggttacatgaatgagtatagctgaagagagaatttttgaattagaagacagatgagtggggattacacagaacgtggcaaggagagtaagttggtagaaccattttacagatgggaaattaaggccagaggggagtgtgttcctgagatccctcctgaggttagtagcatggctcggactagatcctccaaagtctcttaactcctggtctcaggctattttccacaaagagctgggggcctctgtggggtgaagaagacttaggacaccatggggcaccattatgaggccatttcctcctaggagaaaaaaaatctctgggctctgaaaggagtagaattagggtaggaaattaagagaggctaccgaccacctcctccaactaaaattggttcttttggtgccaggaagagacacacctggtgggggagggaaggtggtaatggagggggtgctggtagtgtctcccagatagacccatccaacaagtctcatggagaatgagacggtcactcaggtcatctgcgtattcttggcattcttgctgcctagagagagagtctgatggagctaggtggccaccaagctgtcccactccccaagacagtttggaaacatgggcaccaaggcatgtccctgtctaggggactggggaaatatcccatagcagtgttctcacagtatggggctggccatgaataccccaggagtccaacctccctttgtccagctagaccatggtgtcctatgcctcaggcagggaatgtggtccagtcatcagtggctgggccgtctgccatacatggtgcaagccatggcgttttatgcagaaagtcctgctagcatttgattttctcagaatggagctgtgagcatggcaggcaaccactgtttcctggattcttcaccaagacaccccaagttcctggtctctccccgttatcctcatccctgaccctgtggttctcagagcctccaaacacactcaggctaagcactccatagacaggggaaatttggaaggaacatctagggagctcagaaaagccaatgtccctagccccaggcccacttcaaccttctctctgtcagtcctgcctgcccctggaggctggttacatgaagagtaaccccctgcttgtgtatagccccccagttttgtacaggtttagagacagttcccagcagtaggaacagctgccgaggtgggagagggcttctcccgatagccgggggacttcctctcccaggaacaacagggtggggtagagcaggcttgtcgttgctgagatagagagagggaagggaaacaacaaggaaagtgggggcactgggtccccaaggttcctggcacagcaagcagtgaagttggggcagcctcaggtcatgtagtgggggcaggtgacatctgctttgactgctcctaagagatatgtactcatctcctggattccaaactgcagcctgggacatgttttcttatataaacagcatcaaaagatgtgtgagttcccaggctagcccactgaaccctacctagtgggtgctcattgtcccccagagcccccagaagacaagccgtggctttgtgatgggcctggggccaggaggacctagggatatgttgtgaagagctgagaagactctggaaaaaaggggctctggagccaagcaggagcccgcccaggactcctcacgtgtccaagtcacctagggagagaaacagagcagcccaggttggtccctggaagagagcagcggaggaggggaaaggggagagcccctggggagagctttgaaagtcaagtgctgtttgctcagtgtgtttgcctttccgaggatgtgtttttttttccctccgttagtcagcagtgggagggggagagagacgggtggtagggtgcagggtacctcctggctgcaggcatatgctttgagtgcgtgttcatttacctcctctggacttcctgccttctgttaccagggatcaagacacaggtcattaggcgtgaggtaatggggcatctcttgttctgacccctggcgccagtcttggagtcctgacgctgcagaggagccccagagtcacatttcctgttggggcccatcctgctcatatgcggcaccatcagacttctgggcaggcaagattacctgtgactctgtctgatggtctcgccatcaatatcactgagagtagctgtgtatggagtcccgaactggtacaggataaaacagggggctgaaaagggaatgaatgggcacagtttctctggcatcaaaagtcacatccagaattgatatttcctgttgagtaaaaatagaaatataagttgctcagtggatgttgagtgagccctattcatgtgccccactctgtgccaagcaccaggaaggagggaagggaaaaatgataagatgttctccccgttctccaggagtttatgctccactaagaagtcagagctaacatgcacagaacagtgtggcagcgagagcagaaccgtgtggccagctccatgcttgccgcctagcaagcgtgattgcacttcatcctcataacaacttggtgaggtgtgttgctctgttgtcccattttacagcagagaggactgactctcagtgaattgaaatgtctcagtgaggtcttccacagcaaaaggcgaagcacagagaaggaagtccatgtgggctgggagttcacccagagattcatgtaggggcaatgtgggctgtaccttgcaagatggtgggatttcaatgaggagaagacaaagtgggaggaagctggagacaaggactgtggtctcttcctttagaagtcagttcaatctttttttccttgtggaagcagcataactctaggtggttcctctgtatctgaggacaagctttgtagaggtgacaaaggggtcctaggtcctatcaggcaagcactcgatatgctgccagttcattctgtccattgtgagatacccattccagagcgcttcctctgtgccaggctctacggaggttctggatgttaaagaggaagcaggcatggccctggccctcccagtcttgtgggagattgatcatgcccatgaatagtgaccatgtggtcagagccacagggtcaattccaaatgcccctgtttctcttttgtgttactcacctgactctgggtctttcgtttcttccattcattttttttaaacaaatatttcctgcccaccttctgtgtgccaggcctggggatgcagtgggagaagcctctgtcctcctcagtggaggcgctaactcagaacaggcagtggagaaaaacaacatgacctggagacctggtgccccttccttccccagcatctttgaaattcttttggttgttgttgttttgagatggagtctcactctgttgtcaggctggagtgcagtggcgcgatctcaactcactgcaacctctgcctcccaggttcaagtaattctccctgcctcagcctcccaagtagctgggattacaggtgctctctaccatgcccagtaatattttttgtatttttagtagagacagggtttcgccatgttggccagcctggtctcaaactcctgacctcaggtgatccacctgccttggcctcccaaaatgctgggattacaagcatgagccactgtgcctggcctgaaattcttcaatatctacctgcccttctgccagttggtgcagccacagtgggctgcttatgcatatcctggcctggcttggtggggagcatggctgagggagagccggggcacccatcaattaaggaggtaaagatcagtctgactgagatgcctcctgccacacttcctcagctgccagcaactgacaccattaacctgatttccttccccctctgttgactgcactgactattggactgaatgggaaacagccccgtgcacctcaaaatgcacttcccctcctgcagatgcatcttgcaattaggcccaaactgtgagcctgcatgctcctcccctggccctgcacaggcaacaaagctgaagttaatcagaggtacaaatggctggctatgcctctctgacacgtaacttctggaacatgtatcaatgctttggaaatgaaaagctcctggtattgcaatgccaggctggtgcccataagggccagaaaacattccttgggcaaagccagggggagtgggtgatctgatcccagctcaggtttgttgatttgttgttttgtttgtttcgttttgtatggggcaagggttgagggtatgaaaaacttacactatcatttactaccgtagtccccagaacccagcacaccagcacaaggcctggaacagggataccttttttgaatgaataagtctttttttttttttttttttttttttttgagacagagtttcactcttgttgcccaggctggagtgcagtggcgcgatctcggctcactgcaacctccgcctcctgggttcaagcgattctcctgcctcagcctctcgagtagctaggattacaggtatgcgccaccacgcctggctaatattttggtatttttagtagagatggggtttcaccatgttggccaggctggtctcaaactcctgacctcaggtgatccacccaccttggcctcccagagtgctgggattacaggcgtgagccactgtgcccagccttgaatggataagtcttaagggatatttttggaaaggatattctaaaaaatacccatgtctctacactattgcagaagggctttcagttttgatggcagcctttcaggccagcctacacgcaactaaacttttccataacagcatcacacttacacaagaagaaggttttataatccacttgccattatttaacatagttcttcctccttaactttcaagatctgagcactataatgttcttctttttgtttttgtttttttctaaatcaaattaaggtgagtcacctcaccttgggcctgagttggacagaaatctattcttggctatattccccacccctccaccaccttggaaccttatagaactttatgtggttcaggaaaatgagggcgaggcctcagatcttcaacccatgacagctgtatgcccagctccctgccttcctgtcttacccccagctagggcacaggactgactattgtgcccagagaggtgccagagcctgtaacaaccccagacttcccaggtccagccacatccaccccagagccccaaaagatgatcttcagagagacctttaaaacacaagtagctggtcacttccatccagaccagaacccaagatggctgtgctcttgctgagacatgttggttgtcattgcctccgagcccactttagccctcagctctgtaccagaaatgctgttcctttgggaatcacagccaaagaagagatggagcagttctggaataagaacacaagttcaaactgtcccatatctccccacatcactatctacagttggtctcttcccatggcgatgtccatctgccaccgtggcactggtattgctttgagtgcaggggtctctctttttggcatgttggccctgttactccctgggaactttgagtcttatttggaatgcgtgaagtccctgtgtccggggccagcactgatccacacagctaagtttgcactcatcttccctctcatgtatcatatctggaatggggtctgacacttgatgtgggacctaggaaaaggcctgaagattccccagctataccaatctggagtggttgtcccggttcttactgtactgtcctctgtagggctggcagccatgtgaagaacagaggttcccagcatcatcttcctacacattattacattcacccatctttctgtttctcacttttatctccagcctgggaaaagttctccttatttgtttaaatccttttgtgcttttagatccccttggagcagtagagtaccttgtagaccataagagtggaaaagggtctagttttctccttgtttctaaagatggggtggctgaaaaaactccccttttttgcctacagcttgcctctctgggcctagaagtggttattctgtctccatattggcctttgatttgtgctgagggtcagcttttggctccttcttcctgagacagtggaaacaatgccagctgtgtggcttctgccctgggggctgggggtgaggctttgggtgccactgcctgtgggttgctggcttaaaggacaattctgttcattggtgagagcccaggccattaacacctacgcagtgttattgaaagaagagaggcgggggtggaggggaattagtctatcccagctagagggagataaagagggctagttagttcttggagcagctgctttgaggagaaaatgtatagcttttgacacaacaggaagatccagaaaattatcattgaacatattaaaggttatttctttttcttgcaaaacacacacacacacacacacacacacacacacacgcgaacacacgcagctgatgattctactctcccagccccagccctgaaggggacccagaactccctgcacaaaggctgtccttcaaggggagggtgaaagaagtggaaaatcacattttcattctttagcgtctccatacaacagccagaactgggcagaagctaattatatcagaagcatactccatgttgctgcatcagctttgggatgttcatttttaaatttatttatagcttgtctcattcctcaaaggagttcagggagctacaaaaataaagacaataaaattgaaaaaaattaaattaaaaaaaccatgaccagggaaaatgtgcagtagaatgaagtgtcaattatcacgttttctgactgcaaaatctcccccacggctgatgcaccatcatttactacaacagcccctcttgttggacatttccagtttatttcgtttgggatggtttgttgctgttgctgtggttgtggttttgttttattgaattttgtgttagctgcagctaataccatcttgctgatggctttgcgctgctcttgaatgattactcaggataaatttcctggagacggattataggatcagaaggtctgaacttctgtgtggctctagctacaaagcaccagattgctttccaagagcgttgtagcaatttataatccaacactcagcctattttttggctgggagtcaagccccagaatgtgaaggaggggtcttggcctggagcaggggctgagggatgggtgcacaggacccctccttattggttatttatggggatgggccaggaggagcagaatagaggcccctgccctcccagttgctccttggagtgactgaccccataggggaggggcgaggctacctcacatttagaactatgtagttggtgatggtcaaggtcctaggtctgatgggcatcctcctccctctcctcctcagccagtaatggctgcactatgtcgtatgtcctagatctgggtcccttttgctgtgggaacaccaataatacttacgctgtttcctgccggaaacggtgcaggagggctgtggcatggtagtgggccctggaaaccatctagccttcatgaggaagggcagttaaagcacaggcatgtatgatgttggtattgattaaaagcctcacgggcagagaaattcgccatctgccagggccccagccatacgagggctccagccatacatcctccaggagactgggacctctccaattgcaggagccttgccttccccatcagattaggaattccccgaggatggggacaatgtccttcccacctgcttgagaactcctaaggggcatgtactctgtctccccattgtatctggaacttcctgggagcatagctcctgtctccgtcctcagactgggaatcccctaagggcagaggccatgtccttccacccacttgggattccctgaagttggggaccacatctctgatgtacaatgctttgtatgtactgactgctgcaggattcttggagtaaatgggcagtcaacttcttggactggtattgaccatctggacttcatcagagtgtccaagactttgccattcattagacaggggccatgtgcacaggcagagccctggcctctggcttctggctcctgactcctggtccctctgctttaatttggctaatggcagaaccagactcctttctgggctgccctggaaggggatccttgaatgaaagaggatagatgggaaggtggcagctgacatggttacctcttatgccatgggggggctgctctctctggaaatttaggcctggggtcagggcactgttgagcattttacaccctaggccagaggaggggtgacctgtggagcagggctaagctagtagcccatgaggtatgatgtgtaggcagcacctggggctcacagagcctgttacccatgttatctcctctgaccttggaaagagctggggtgtatgaacaagtatttataagtttacaaaaatcatatgaggaaactgaggcacggggaaggtaaatgacatgccctaggttacacagcttataagtagcagggattctgcccttctgtcacaccaagtcccactgtcttttcttcctggagtccctgtgactgatctaaaggccacatgtttaacagaataaggaggaggcctctgttgcagcaaaccagctaccccacccgcacacagactctaagggacatcctgctttaagctgtccttagttactaatacctcagtgagaatgagtttgaaattttctcaagagccatgggagactaggaagtctctaagcttcatagagagcctggcttggggggacacaggagccaaaggcagaggaagaagtggcagctttgtgcccccagaaacacgtgctcctgacctcacagttggccacagccagccaactctcccatccttctcccaccactttcccgtggggctaacttcaccctgtccacacggagtgacttaacagtttaagccccagagtcgggggccggggtacctgggacaagagtcctgagggaaatggggtgaggaactggaagtgccacagggctagagttctgcccctagcctactggagctgtgccccacaggctggccccactggactgcgctgcctccaagccatcctgggcatctccatgtgtagctgtcacgctcctcccactaaacgcctccctgtgcttcctctgcagttttcatgaacacggccatccccattgcagctgtcctcatagtaagtggatcctttctccatctcttgggggtagggtggagggggagggcgtctgcagtgacaggctgcccagatttggcctttctgcacaggggcctcagaagacaggctccacagccagactgaaaataggatcgaaagtttatagagggtgtggcccctccccaactccagccgaacaggggcctctgcctccaggcctggaagaccggaggcttagtatttagagaaattaaactttcttttaaaaaatagctatccaaatttttaatttttaaagtgaaacatgtgtattgtagaagtgatgggaaatccagaacagaaagctcaaagagaattaaaatcacccataatcccactggtaacatttttaatgtgtttctttccagtctttttttaaggcctatgatatgtcattttctacaaaaataggaatgtgctatgcatgcagttttgcaacctgctcttttaaatttaggaatatgccacacacaattctccatgccactgaatattatgatggtggctttctaaagcaattttgataaaagctgtgtgtgagctgagccatgggggtcaagcagcatgctcctacagaaaggcctgggcccctacgagcctgcagccccctcacccagcctcccatccccatcttctgtgatggctgcagttccttaaaaagatctgcttatttcccccggggccagtgtccctgagctgtgtagagttcacagcctgtcggatacacttgggaattcacttccaatgtgatgtattgagctggttcctggcctggctcctgggggaactgtgggtaacagaggccactgagccagccaggtggctggggcaaagcactgtgcagtttcgtaatcactctgtttacgttatcccgatgaggactggggagatgagcaccccgcctgctgtctgcagagggggccgtgctgacctaacccgagatctcctccctgcttattcccagccaagactgggcaggacagggagtcttggccaggacagggagggagcagcccctgctctccagcttgaagtcctgaacttgttggggacgtttccatgagatgactgtggggatgatgaaggtgtctccaactaaaagatcctcttaggagcctgctccctgacagccctctcatttcccttccagtgctgagcgtttccagtgtgggagggacccacaccctgggccaccctggcctcacttgtgcctctgtccacagactttcgtgggccacgtcagcttcttcaaagaggccgacttctcgccctccgtggcctttgcctccctctccctcttccatatcttggtcacaccgctgttcctgctgtccagtgtggtccgatctaccgtcaaagctctagtgaggtgaggggagggtccgggcgagggcactgggcaggcaggtcctgtgtcagcctcaaggcttgctcgagtgatggccaaaccacagctgtttggtcccggaacacacccccattgctgggccttgctgtagctggtcctggttggtcagagggacattggcctgtatggtttcccagctcgccatccctgagcaaggacttgcttacatacctcccaggagaggggactcactgtcactttcacgacaacttaaaaaaaaaaaaaaaccagtgttgagccaaatgtggaatcctcctaaattctacccactggtcctaacttcaccctccagagccaccaagaatgaggccatcccgtccccacgtggctgccccatggatatcagaaggcatccactgtgtctatctttcccaggccaagtatcccctaccctttccacagcccctgagccctcacagcctcagccagtgaaacagcttcccccaagcgctgggtcctgctctgattggcccacagctcttggaggctcccacttccaggctctagagcctcatggggactctgccactgtcccagaggcattgccctcttgggaatgaaagcctgaaggtagaaggctgaggctttggctgggaaatgccctgtctggagtgagaagatgtccttgggcctctgaagtagctctgcctccttgaaagcaagagcctgtcatgcctctatggagggctggcttgtccttacccatggccagagaaccagtcagtaacaaatgtcctctgtgtcttcagccttgaggaaggtgacacccctgtctcatgggaccctggcaggtactgggaagctggaaggaaggagtagctgttggaatgaagtagctgatagagagggtagcttgcagggggagactctagcatgggttcaaagatggaatggggcataactcagcaaaattatgctctaaggagtatctgaccaggcagtagctggttaaacagggattagctcccatttccacagtcggctgtgctgactcagtttcttgaccagggtgttgtggggtctgaagatcacccctcctcccaccacccactctccagccctatgattctgtgtagaaaccacagatttaagaacgctgcacctgcctgaaaactgttgcactgatcccaaagcgttcatattttcaaacactctggatcccactgtttccaggaatggaacaccagagtagcagaggccttttcagtgaggcagctcaggctctggctgaaggtgggcgcaggacactacctgaagcttcaccccaagagatgagggccagctccactcttcccagtcaccgcctgtgggggagggaggctggacagggcatgaaggcagagcctggtggtctgcccctcccatctaggggtggcgcacagaaagggagactccaggccacagctcacttacaccccagaataaccttgccttgagggtgggatggcttgtctgccccaggcctgttggacatttagcaaaagagaagaaaggggaatacaaacaatcctgagcttcccagaaagctttcacacctccaggatgggagagaatgaactagaagagtgaagcttccagtgcttcctcaggtccacagggaaatctggacaggggagagggtaggaatagccgcctcccccgtgagtaatgacacctcctccagcaggctgttatggggatccgattacataatgctacaaaacagttaacacagtgtctggcatttagtgtatgctcacaaaatactagctattgattctttaccaatcctagtcctaactaaccttaaccctgaccaatccaacaccaaccatccttcagtctaataacccagactaactaacttcaacattaaccctaaaactaaccaatctcacctccaatccagaccccagcctattccagctgactggtcaaccctagcaaaccctggtaacaccaattacctgcccccatgcccactggtctgcccccttcagtgtgggctttgtgggactatacttcaggcctgagatcctgctcagagctctctatcaggctgcgccctctcccctcccctctgcccctggcaggggtgaggggtgtctctgtgcttcccgagcagcgtgcaaaagctaagcgagttcctgtccagtgcagagatccgtgaggagcagtgtgccccccatgagcccacacctcagggcccagccagcaagtaccaggcggtggtgagtgcccggcctccccttgctactcccagcatggtcctctaaggcccaaaacttgggcctgctgtgtcggacttctgccttttttcccaggaagaggggctcccttccctacacagctcccagcccagtgggtcctcacctccaaaccacccccagcccctcagggttgtgaaccgcaagcgtccagcccgggaggattgtcggggcctcaccggcccactgcagagcctggtccccagtgcagatggcgatgctgacaactgctgtgtccaggtgagtcctgctgccccatgcctggccacccagcaccaactcccagagggagctcagcacctggaaagccagaaagctgcatgcttagtcctctgcagaggtcaccctgcctgcctgtacggtccataggagtccagaaaccagggaccaccaagtggggggacccccagccttaggcaagggtcagcatgagaaggccagtctcccactcccctgctctggaagtgatccaggggctggaatcagtgtcttttggctttcatggaggaggggaagccagagactattcactgggaactggctgcctttctgttctctcctgggcggtgggacacgcctaatgaagatcatgggaggctacttcacgtggaccccagatggaatccccacactgtccaacatcaccattcgtatcccccgaggtatggcccagtccacccctccagcatgcccctccccatgtcccactgaataacatagagataaaaagacaaagctgcatttattgagcacctactctctgctcattcttggtgtatgccctgggtatattatagaaggggaaggctacattctagaggcttccgtgtgctgggtgggagtgaagcactaaggacagggtaaaattgccagccttaatgtcaaaccatccattgcagacagtataggtaatgcacaaaaagatcagaagtgggtagccaaggaacgcaagtggaagtgatggggtttctgagaatggacaaaggccctgaggccatgaggcaggaggattttctggcagaggcagccatgagcaaagtatggaggtgggttggaggtgggacccaggatggtgtttcttgggaccacaaggagcctgggctcatactaggagcatgggaaaggagaagcgagtgcttaggaagggtggcggggcaggaaatcagagagggggaaggacctggggagccagaggaggatgttgatttccagaaggaaaggattaaagagggagaggacttgctggggattctaggtaggaagaaagaaaacaggggccccagggttgggtgcatctgtctgtctgtctttctgggtaatggttgttcagactcccccggccccactcacatctgccaccctccctccctgcaggccagctgactatgatcgtggggcaggtgggctgcggcaagtcctcgctccttctagccgcactgggggagatgcagaaggtctcaggggctgtcttctggagcaggtaatacatgtatcctcagggcccagtggaggggaaatctccttttaaccatcctcctcagttgaggatgcacacacatttattggagggcccactctgtgttcagtgaggactcaataaatgctgctaatggatattctcatcatcatcactagtacgtattcacctcttactatgcgcaggttctttgctaagtcctttgcatgcattatttcatttaatttttatgataactaacaaggtccatactgttctcaattctcatttatagaggaaggttaaactatttgtcctaattcacacagctaataagtggcagagctggaattgaaactcagttctgtcagactctgaatcccatggttactcagatgcacggcagtaatttcccagtgtgggaaattgcaacaccaacattggtttccagcttggtcctgagctgcactgacctacacaccataagtgggtgttctgaagatccagatgtaaccaataaatgttggtttctgggcaaagatcactgtcttaattaaagagccagaaccccaggctcagtcaatcacgaatctgttatttatacccacctacttccaagaagcacttgaaactagttgatgaaagattcatgtaaaaatcaaaaccacaatgagataccatctcacacccgttagaatggtgatcgttaaaaagtcaggaaacaacaaatgctggagaggatgtggagaaataggaacgcttttacactgttggtgggagtgtaaattagttcaaccattgtggaagacagtgcggtgattcctcaaggatctagaaccagaaataccatttgacccagcaattccattactgggtatatacccaaaggattataaatcattctactataaagacacatgcagacgtatgtttattgcagcactattcacaatagcaaagacttggaaacaacccaaatgcccatcaatgatagactggataaagaaaatgtggcacatatacaccatggaatactatgcagacataaaaaaggttgagttcgtgtcctttgcagggacatggatgaagctggaaactatcattctcagcaaactcacacaggaacagaaaagcaaataccacatgttctcactcataagtgggagttgaacaatgagaacacatggacacagggaggggaacatcacacactggggcctgtctgggggtggggggcaaggggagggatagcattaggagaaatacttaatgtagatgaagggttgatgggtgcagcaaaccaccatggcatgtgtatacctatgtaacaaacctgcacgttctgcacgtatatcccagaacttgaagtataataaaaaaagatgcatgtaaaataaaaccctttaaaaaggtaagaaaataggaactgagaaatgaagagggtaaaaagatgttcagcaacctgggcagaggacaactacagccatcaacataaaacctggctctgtgccctctggtagccaagggaaaaagggatctctgggctttggagtattcatttaggaataaaagttgcagccaatcagcagaagggcaagctttccctaccaatcatttctaggggaaaattattgaaggtgtcaggtttttcataagcatgagtacagaactgagcagggagaaagactttgggcccaatgtctgaatatcaacatgcacccccgtttcctgcatttccaagatgtccctgaatggtgtatccaaaagatggcaaatttccctcctcagtggggtcgtgggctagcagatgagccccttgggtttcccatcacctcccatcagggactgtgatgtctttgggggcagaggggtctttgcctccattcgccattttatttgggagatttttcaacatagcctgactgggaaggcccaggtattcggtttgagatcatattgccttattccgactgcctctccagcctttggagggaggagcccttttctgctgtccaactgcatgcctgcagcaagaagacaagagtccccagtgcactgtgagctgaagaaagtaaccaatatttattgggtacctcctatgggccatgccctttgctaagtgcattgtcaacatgatctcatcaagcctcctactaagtttaggaggggagtgttgttaccccatttcacagaagcagaaactcaggctcagagaagttgggtgacttactagtcagtgtgtggagcagagactctgcccatgttctttccctcaaacctggtcactgctggggcccccagggcctagtcctaagggttattgtccaagccccatgtagtggtcaggctggatctgggctctcctccaaggcagggcttttccagaaggattgcagggctcagacactggagctgcccctgccttgacctgctcagcatggatgtcaaaacccactctgaacctggtccctttgccctgctttcttctcctcccccaccctcatgccctcatgtggcatcgtgcctgcctcaggagctctccttgtcctatgtagatgaagcaggcatgattggcaggggtctgctctgccctgcctcagtccccacctcttctccaagctgtgccaaccctccgggtctgactgctgcccctctctcttaggaaacctctgccccagcccagggaacacaaggagcctctccaaggcagaggaccctaagcacttcttttttttattattttttattttattttaggttctgagatacatgtgcagagtgtgcaggtttgttacatagctatacatgtgccatggtgctttgctgcacctatcaacctgtcatctttttaagccccacatgtattaggtatttgtcctaatgctctccctcctcttgcctcccaccccccgacaggctcggtatgtgatgttcccctccctgtgtccacgtgttctcattgttcaactcccacttatagtgagcacatgtggtggttggttttctgttcctgcctaagcacttattataggccaggcactgtgcaggcacctcatcatctcagtcagtctgcaccgaactctgtgcagtagatattattatatcctcatttatcagattaggaaactgaggtgaagcaagttgtccaaggccacccagctgttaaatggcagaagtgggatttgcacctaggtgctcaagtgcattggtttgccaccatgtgctcaaagagaaggggcacaagagcctcatgaagaaggcatagctagcctgacagtccaaaggccagcagccgctgtggccatgactcacacacacctgcctcctcccagaactgccacgtgggtcctcacagctctgtccttatcaacacttactctcctttacaggtagcctaggccccagctcccagctctgttcgaggctcgcagaggggcggtagtgaaggggtctcatttctccaggatcctctttgctctctcgcccggtcctggtccagcttccctttcaagcatagtgaagtgcatttgttagcttgcagccaaccctgggaaatcatgagaatttgttcccaagtcaactcattctccagcgtccacagtgacgtattcactcacccagttgagcgcctagtgtatactagaccctgtgacagcaacaggagtgcaaaggtgactaagacgtggcccctgctttttttttttttttttttttttgagacggagtctcgccctgttgcccaggctggagtgcagtggtgcgatctcagctcctcacaagctctgcctcctaggttcaagcgattctcctgcttcagcctcccaagtagctgggactacaggtgtacaccaccatgccggctaattttttgtatttttagtagagacggggtttcactatgttggccagggtaatctcgaactcctgacctcatgatccgcccgcctcagcctcccaaagtgctgggattacaggcatgagccaccacccctggccggccccgcttttaagagaggggagagaagacctgggccttagaagagctcagaggaaccacaattgactctgcagtcaaggagaggaggctcactgcggatgtggtatttgagccttgaaggatgagtgtggtttcatcaagtagaaaaggcagggatgggaaagggaggtggtccaggcaggggtgatggtgtgggcaaagccttgctgatattaaagaacatagttctgtgcacctggaacactggatgcatggggtgcattatgaaagatgggactgaagaagtgaacttggcttagatcccatgtagtaggtctgagaagtaagatttaacccaaaggttgcaaaagaaccatgcttgtgataaaggatgatggattggggaaacagagaaaaagacagacagactgtaggaagggaggtattagcaaataatcataacacagtgtgaggtgtgcattaatattcactcattccaagtattgatcaagaagagaggtaggtactgggttaggaaacagcttgggcaaatgcatggggaaatgagagatgtcaagatgcattctaatggcagcctcttgaagatcttaagttgtttttggttcactcatttcgcaaatgaattcatttagcaaaagcactatggatacagtgcttacctctaggaagtaagttttagcccaaatgctgcagaaggatcatgcttatgacaaaggatgatggactggggagagagaaaaagaaaagacagacagactccaggaaggaaggtcagtctgcagctccttatagtggctaggagaaggagtctaggcagatacgactcaattagcttcatctgctgtttgtctctcaaaatctagacatgtgcactgctctggctggcccacctatcctgggcattgagttaagtgtgggggctgtgtgttgagagtccccctccattactggcaggaactccacacctcagacattgagccccaggtctgcagggagaagacgtgcttgcaaagtgagctaaaagcaaaacagcctctgacctggcaagcattcccaagtctgcacgcctgcagccagaggagagggtgatgccaggctgctgctcagatgcttttcagccatacccaggccaagacctggtgaccaggcagccagaaggagttccaggaggcacaaggcaggaagttgggggattaggaggtgtagaatggagaatgctctggggagatgggtgctttgttggtgcaactattcgtttattcctccagtgaccacgtgagcagtatggctgcacacacaggctctgcagccaagctgcctgggttcacatttggtctctgtgctttggaaaatttcataagctttctctaccagtttcccttattacccatgagattgatgtgaggattaacctagcatgtagtaaatatcctataaatattattattcaatagtgtacttctttgccaggaacaaaattcacctgttcctctttaaatgtcctccagtctgtctcctgggaaagattcttgtgagctccctggggacagggaccatattttgtttgtctcactgtatccgtagtgctttttgctaaacgaattcacttgctaaatgaatgaaccaggaacaacttaagaccttcaagaggctgccattataatgcatcttgacatctctctcctttccacatgcctttgtccgagctgtttcctaacccagtatttcactacccctcttctccatcaatatttggaatgagcaaataccgttagtgcatacctcacatggtattataattatttgctaatgcgtctgtctcctccatgactctgagctccttgagggattattccatgttgtaccccaggtgccccatgcagatgtgtattttgtgcactgttctgtgtaggctacaaaggaaaaggcctagcacctgcccttggggagctcacccacccaggatggacagaggtgtgcagacagagctgcagggtgggcacaaagggtccatctgctgaagtcctgcagatgcagccccgagcttgtccctcacgtcagcagcctggctcctggtctcagagagaactgtgtggttcccaagcattcactttaggaagaatcacttgcccctccctggctctctgcttcaaggaactgtgacaaccttgggatttgcaaactctctctttaatccttaagaggaaaatgttttggtaaaaagtcaagattagcagatacactcgggtgaaattctttccctggaaataaagaatagagccattaatatccacagtagagtgactttaaatgcccccggggggtcagcaggaaccagggccctgaggaaaggatcagcgtggggaagaggctcccacttccctgtgaggagctgcacatgcagtctcactggagctccctgctgcaatgctgttgcctgtggtggttggtgtggatgctgcctgccaagagccctgattccccaggaagagagaaaaaggcttctctcaggacggccctggtcgcatctgcctgtacaattcctggagcctttggggagctgaagtcaggggctcaagtgcccctgggtttcctggaggaggcaggtgtggtgagacagctgacagacaggagaagggatgctctgaggaagtgactgtccagccatgggaaccagatggcccctggctgtagtcctgatgctgccacttgctagctctgtgaccttgagcaggttacttcacctctctgagacagactcactgtctggacaatgagtaaaaccctacctttcctgtctcagagatttggcaatgggacccaatgacatcaattggaaaggatgctgtgggtgaaaggtaacctttcaggacagcgacaagcctgtctgggcaggatgaatgggctgtggagccctgtatatcctagctcactctttgaacctcagtttccacttcttccctttttatttattgccggggtcttaaatgagtgttgggggtatctgattctccctctgcctgtacttttggggccaagcactgagctgaaaagacaattcctcctagttctccaagcctacaacctgccccctaaccagctgtgagctgtaatacattctccagtgtcactgtgaggtttgtgccttcacccccattttatagatcaggaaacagaggctcctccaagtaaaggagcttgcctcagatttcacagccaatgagtggaaaagcctctgggattcaaatgtcagagcccatatttttcctacttctcgcacctgttatcatatgctgcctcttcctttaacctgcagttccctcccttcacctccaccgtctcaatccttcccactctttaaggttcagttcagctatgacttcttctatgaggctctactcattttctcagatttcttcctcctccaaatttcttgtaaaaattatgttttttctctgattctaaaagaatgcacattacattagaaaagatacacaagcatacagaagataaaaaccacctaatatcccatcacccagaagcttccagtttttctttatgcatttgcatatgcatttgtgtttacttttccccaaaagttctccgatactttgtcctacttttcttttgacccttataacttcctgacttcggtacctttctgatttgccctaccagagtgtgagcccctggaaggcagcctctgcaccctgattcaggttgccacacatatgccagctcctagtgggctggagggaaggacatgcggttggggaactggaagactcatgctttcagctgtgtgcttcctccctagagtgcaggcagaggaggaatcgaatcccctcagcactcttgtaaagaccacagcaatgagtgagagatggtgcctgccagacataccattctttacttttcagcttaaaacagatacaaagtttggggaggctcactggaggaggcttggggctacactggaaagagaagaacttggattcacaccccagcttcccctcttcccagctctgtcacatttgcaaactctgagtctcagtatcctcatgtgtaaaatggggatagggtttatagggttgtaaggatgagatgatgagttgtttgcaaacaacttctcacagtgcacagtgaaggtcagcaatgagagccagccccgccctttcttctttccaaatgattaatatatctgttaccagcctccattcattatatagctctgtcatgtgctaagcaccatgggggctgaaaaagatgttcttcctgccttaaaattccactggggatgaacaaattacacgggagctgatcagagaggaaggcagtccattatgagggctaattgagcagtgcagaccatgttgcaaactgagttagggcctggagagcttactgtgtgctggggtcctcaggaatgccacagatgcatcaataaccacctctgctactctggaagtagtcacatcaggaagactccagagataagcttatctgggctgtggccacagagctggaatttgtaagctttaggtttctatgtctcatgttaccagcttgtctataaattgtaaattacagccatctgatggttagggaatatgaagtttggttaagagaatgaaatgagaccacgaagattagagaacaggaaaagaggggactggggactacatacccatcagaatcttcattcagtcctgaccctcagcaggagggggatttcatcaggctcatttccatccttgatttcgtccatcctggttctcctgacaaggggcatttatcagagttatggcatgggaaatcacaggggagtaatgtaccatggcatttaagagtatgaacgttggagtcggagctattttctccgctacttactagctgtgtgactttgggcaagttacttagcctttctctgagcctcactttctttatctgtaaagtgagggcgatcagaataaacctccttcatatggttattttgagctttataaagagacaatactggctgagcacggtggctcactgccagtaatcccagcactttaggaggccaaagctggaggatcgcttgagcccaggagttggagaccagcctgggcaacatagggaatgagactcctgtctctacaaaaaatatacaaaaattagtcaggcatggtggtacgtgcctgtaatcccatctactcaggaggctaaggcaggaggatcgcttgagcccaggaggtggaggttgcagtgagccaagatcacgccattgtactccagcctgggcaacaggagtgaaaccctgtctgagagagagagagagagagaaaatactactatggtgcttataaaagttcaataaattttagctgttgttagtattattaaagtaagatctgtatgaaaataaagcagattttttcccccaaatgttcatgtcagaagtatatatttcattggcaaggggctgcttctggaaggttgagaggtatcctgggggaggggatagagcactggcaaaattggcatcacaattcaagtcacctcactcagtgttttttaagttatcaaaatccacagtatgaaaagcatttgacattacagtccactatatttatgcatttataaacaagagaaaaaatcacgaaaaatacagtaccacgtgcagtacacactgattccatctattctttttttttctttttcctcaaatgcacttgccgcctacttattccagacccaatgattgggtccctatccacagtttggaaaacactataagaaatgattgtgtcctctcactttccctctctgggatttagttttccaactataaaatgctcctgatgcccagccagcctcaccgctgctccgagtcaatgccaggaacgctgatttagcacatgctatttggagggtacccatccaggtgctgtgggagggacagagattgagaagagtgctttctgaccccacagaggccatttggaaaccctgggaatgggtgggagggttggaggtggggattgcttctcccctaagactcagcgtgatggaaaggcaatggggtgggaactaactggtgttggtctgtcccatttgtgtcccagcagccttcctgacagcgagataggagaggaccccaggtacagccttgggactgggtcagaagtgggtctcaacaaagggaaggggtagggtgggggtggaggacttgtgggtgggtaatgctgagtatggattcagggatgtgcagcctacatattttcagagacatggggctaaggcctgcattctcaatgagggcaaaatttggttcttggggacagaaaacacttagacattgcaatgctttgtggctgtccaaagtaccaaacagatgccagtatatctgtggtgctgaaatttcatggtgaatggagtcagaaaatagactagcgattgccagggtctggtgggagagagagggaagggactgccaatgtgtatgggatttgttttggggaagataaaaatgttttggaattagatagtggagatagttgcacaacctggtgaacgtacttttagtttcagaggttttctaaacctctgatttttttttaagtgacaggaaagacagaaaaaagtatatctaaaaaggctctaggggtgatcatggaaaagaaagttaagaaatatgactgtaaggaaaggagatgggtgtccctcaggccaggcagaaaattcagtcttgttgctttatgttcatgtgcaaatctaaaaaatccaagtgatatagattaatgaggctctgagtccctcaaaaccttccctccccttacctctccaaaaaacacttgagataccctagaggtggtatgaagtcaggatgggaaggttggctcagctttgcaaataagtttaagcctctggcctttgctctccaacaccaaagaggcttcactttggtatattttctctgccctttctccctccttgtccccaactgtcagtatgtgatgacaggctcagcctctgtaatggtagtgatcatatttcttgagccaaaaatcagacctcatggcatgtgacaagtttgcatatgtggatgagaacagagtggcagaatatttgacacgggagcagcttgggcagtccagggcacatggcactgcacctgacatccctggcagatcccccacattccgtggttgtcttctgatggggccatatggggctgcagatcatgcctggagccctcgcagctccagggctgcgggttcccagccccagagtgcaggtgctggtgtcagcctgcctggcctggcctggctctgtccagagcactccttgccccagctgtttgtgcagctgtatcagcctcagacctcagcctattcattccaacctgaatgcagaggctgggtctggaggagccacattgcgggcttcatactcctgatctgacaagttttccccccagagcctgcaccaatggcacctctccccattctccctcttaactgggtcctccagggccctcctcacacacccacgtggtcaggcagcagaggcttccccaagatgggcacaccccactctccacacctctctatgcagcatttgtggctacagactgggtccaggggattgtaaaggcatgctcatgttgggttggagggagctcaggatcttcctggaggatatggttcactcccatgagagctcagtatgcctttcctcccctgctgcagcccagagcgggagacagcgaccgacttggatatcaggtactgcgtcctgggaacattgccccccagggtcaactccctccagggtgctctcaggcccaagggagccacatcaccctgctgggcagcccccagaccccagccccagtgttgggggaggccagggagggcccctgtgctccaccaggtggctcgggagctgctgctgtttctgtgcatccatttactcccttcacataagatcatttttatctgggatctctttttcttttttcttcaaaaaccacatcactcaaaatgtggcttccttggctctgcttttaaaaaaaaaaaaaaaagttcttccatttggagaattacctgctgacttcaaagtccagtggcttgagggctacccaaagagggaggaagccagaagttgagtgttcccttggtttggtcacacttttgggctcctccctgactaaggaacaacagactgcagggctggggcaggctgggtgtagggcagggaggggatgaggtcctgctgccccagtcagttgagacccagacctctcaaacctgcctgggggaaggcaaggccaccagaggccacactaagcagatttctaccaactgcacctccccatccccttgcctccatctgagccatcagcttgacaactgcctctgagaacaagcccctgagaatgccttccgcaccccctactcccgccctgctttttccaggaagagaggccccgtggcctatgcttcgcagaaaccatggctgctaaatgccactgtggaggagaacatcatctttgagagtcccttcaacaaacaacggtaaaagcctgtcggagggaggcaggatgtggaggggaggaactgtctctggccagcctgccccagttccgggcccctccatcgatcacccacacccagccatctcactccccaggtgcttacctgcactccagcctctccatatggtgcacctggagaggggccaggtgtgcctgagcattggggcaatccagctcccataggggagagggcaggaatggagggaagggagagagccccgctgccttttctctagctggtgggagggctagctagctctctctgtgagtctccattcgcctggctcctgcactattttccctccaatgataatagttagggctagcatcgactgcgctcttactacataccaggcacagtgccgagctctttgtacacggaatttcctctcatgcttacaacaacctcagtaggtagatattattgttattcccactctacagatgaagaaccaagtttcagaaaggtcccaaggccacccagccagtaagtgaccaagatgggtctcaaatccaaagctgcctaacacctaagtacatgtttgtcaccaacatactctgatgcctccatgaactctggctggcacctgcccaggctaagggctggctggggaagtatgagaggaacaggctgggcaaatatttgaccagccatcatcattactgcctaaaccaaccagcagtggttttccctgcagtgccccaagcacgggttccggctgcagcttttcccactgcacagagatcatgagcgccctttcatcacttactctgcatatttgttcccaaccaattccatccttctagtatttaacctgcccaaacgctgtgtgaagtgctgacctcagctcttttcaagctcacacggtgtttgcttgcacccaagcgggaggcctattaaagccattgctcaccctgggcatagctacccagagactaatgaccctctgcaagtgctcgggccaactctgaccaggctgaccagctgcatcccctgcctctacccacgccaggtacaagatggtcattgaagcctgctctctgcagccagacatcgacatcctgccccatggagaccagacccagattggggaacgggttagtagcagcctctgaggggttttttcaaagccaggacccccaacctaccatgccctgagacactactcaggacaatgggtaactaggaaataggagacattgaaggctgaagagttgcctgcagtaaggtcaaacatgttgttcttgatgatgtcctttgacaggttttcagtcctgcttggagggcaaggtcagcttagtgccctcccaggctggggatcttcttcatttgcaccccaggtatacactgagagcccacacagcactgtgctcagcctggggttgtattgttcctgttcatcctccagatggggtcccctccacaagcttagacgaacaggattctcctgtgactgtcctccttttgtgtgattttaatccctgctgcctctgtctttgtttgtactggtcagatggtccctagcgcctacacaatgaatctttaaagacttggggctcatgctgccctcttctgaatgaattcagtaaacacgtgcaagttccttctctatgcaaggtgagaagcaggcaaagaagtggatagagccaggcctccatcccaaagagctcatagtccagtagggtacaggacagtgtctcctgaatggctgagggcatgatgtgttcctcctctttggtgacagggcatcaacctgtctggtggtcaacgccagcgaatcagtgtggcccgagccctctaccagcacgccaacgttgtcttcttggtgagtgcaagttcccttggggtcctggtctctggctgcctcccaggcctaactgcccacctccacctccccgcaaccccaccatcatccaacaatctccctctccaggagtaaatccctcctgccagagatattgccttatcatcctagtgatagggaaactgaggcaggcaaggatagcacaaatgacccattgcagacttcagatggagctctgcagtagccaatgaggagaggcaagctgtagttataggctgcctgtctgtgggacagcccaacccctcaacacttatgcagcccgactataagaatggctgataacagaatgtgtgctgccacttcccatcttatgcccagtgcagacattgctaattgttcacagcattatttcccatggaacttaactcatcctcagaatccttctcaacacagcactccaggtaaccactagccatcaaacatgagataaaactaggccaggcgcggtggctcacgcctgttattccagcactttgggaggccgaggcaggcggatcacgaggtcgggagatcgagaccatcctggccaacacggtgaaaccccgtctctactaaaaatacaaaaaattagctgggtgcggtggcgggcgcctgtagtcccagctactccggaggctgaggcaggagaatggcgtgaacccgggaggcggagcttgcagcgagccgagatcgcaccactgcactccagcctggggacaaaccgagactttgtctcaaaaaaaaaaaaaaaaaaaagaacgtattcgcaatccttacactacttcatgtcaagttctgttgtgtcaggtgccttgactgacactgaagaattctaagaaccagtccttggcctcaaagatttagaatctgattagggagacagagctcacccagttcaagaggcccagcccggttcaaatccaaactgtgcggcataaactatgagggggccttgtccagggagacaactgtgagggctggagtaatcagggagggcttcctggaggagagcctcaaagggagagtcaattaaacagaaggaaagagggaggccatttgcacagtgagttggaagaaggaagctcaagtctctgattccagctttattccctcccctctccctacaccacacgcacaagcactcctttactaaagacacttcacagtgggaagattcagtctccgttaccgtctgacacacacacagcgttttacaaagcatgggtgcattcgcgatctctcatgagatttaaacaaccctgctagagaaaagtgaagtggacattttatttcagtaaacgtttatgaagcgtctactctgtgccaggcactaaacgtttatgaagcgtctactctgtgccaggcacaggcacaagaagtctcagttcttgggagtgccataatcaggaatggacaaacaatgatcagatctggctttgcgccagtgtcacgggaatagggaggaaggaagggtaggcgtgggggtcaggacaggatgcaggaggaactggtgcttaggtgagcgaaggatgggtgggagttcacaaggcagacaaaaggcagagcagcactccaggcagaggaacagctcaggagaaggcccagacggcaggcttcctgggaacctggaatgcagagtgctgggaaagcacagatgaagcatgagtctagaagggaaagcgagaggttataaagcacctggaacaccagcccacagggtttgactttagagatgatggggagccgttgaaggtccaggagtcaggcagtgaagtgattagatctgtttgagagtgatatctgacaactgccccattttaaatgaggtaaccaaggcccagagaggttgggtgagttgtccaaagccacacagctaactagcttcagtccctagagcagagttgatagaactctaatgggttttatactcattgtcacccctccccaccatgcctttccctaccctctactctcttcctctcccttctgcccaggatgaccccttctcagctctggatatccatctgagtgaccacttaatgcaggccggcatccttgagctgctccgggacgacaagaggacagtggtcttagtgacccacaagctacagtacctgccccatgcagactgggtgagggggaacaagggggtcaggctatagggggcagggctggggaggctgtcaggcatcttggcaggaaccaatccgttgtcttggtagcaactgctgagggccacaaagcataagagaccagcactggatggctttatgcatgctgggcatttcagggagaccctgtacaggccaggggtttggtatcacctagacccacagacactccccatcctggcccgggccccccatggtacactcaaggctggcaccaagaagtctcaggaataatcaagtgctcacttctcaccttctgattcctgcccttttgatgacccatccccgcagtcatggggagtgcccatttggatggaaaagccctcttcccaccctatgaccttcccggggtggatggatgcaccaccccgggaatcatatgggaaatatggaaccaaacaatagcagtagtaatagaaacttcaggctgggcgcaggggctcacacctgtaatcccagcactttgggaggccaggacaagaggatcacttgagcccagaagtttaaggctgctgtgaaccatgatcatgccactgcactccactacagcctgggcgacagagccttgtctctgaaaatttgaaaaaggaaagaaagaaagaaagaaacttcaatattatcagtagagtccaatgttgtgaaacccctcattaactaaatttccatactcttcagtaggtagaaaataattactttttgattcattagaaagcacttaatttttaagatggagatcatgtaattttgaactctaggtcttgcctactcctatataaattctcctctaaacaacagccaaaattgaggccctctttgagcttcaggctggtgccaaatggctctgcttattttccccaaaataaatcttccttccatgtatgatgagaccccctccagtataaagaagacccaaagaaaatcacccaaagaaaaaaggcccaaagataagacccaaagacctaaagatttaaatatatatacagatacagaaggtttgtttctgagtttctgtagtgaccttggcaataccttgtagttcaggacaatcctgaggaacacagaagtgctggcttccttgaggaatcagtgatcaggactctcgagccccttgaaccccagcatagggcgggagggggtgagggcagcaggggtgggtgtctgaattaatgtcaggtctacgtgatggtgtcatcaagtgttccagataaaaagttttattgagccgggcgcggtggctaatgcctgtaatcccagcaccttgggaggccaaggcgggtggattgcttgagcccaggagttcgagaccagcttggggcaacatggtgaaaccctatctctataaaaaaaaaaaaaaaaattagccaggtatggtggcgtgcacctgtggtcccagctactcaggaggctgaggcaggaggatggcttgagccaggaagcagagattgcagtgagctgagatggtgccattgcaccccagcctaggcaacagagtgagaccctgtctcaaaaaaaaaaaaaaaaaaagatttattgattccaaagaggcatggccacacacacttagaccagcaggtgctttgctaagccctgatggaggctgccagacccgccgtcaagaggagctaagggtagtgtacaatgagcccacttagtgtatgacggccgctgccgtgggtggagtccttgtgagtaaccagccagcttgagcaggatgcactaatttgctctgcaaacccagccattgagaaatacgcctcagatgtaccgaactctaggtcctaggagtatgttggttggggtaggttatcaataccagcccacttgcagtggatgagctggtggccatttgtagtgaggaaagggatgtgtcaacctccatcttagactccacaattgagggatgtgaccaccattcctccccagccagcccccaaaccacgtttgttgctgcctttccagatcattgccatgaaggatggcaccatccagagggagggtaccctcaaggacttccagaggtctgaatgccagctctttgagcactggaagaccctcatgaaccgacaggaccaagagctggagaaggtgggtatatccagggatggccaagcagccacccctggatgcaaaggttctgctagaacctgaactcataaaggtcttcctgtccttagtgccccaggaagccccctaaagggcagatgtgggagctgggcatgaactggctcctaccagaggagagacagtacctgtgccaggtgcccagggcagaatcaggtgggcaccttcgccttatcctgaggtagtcagatactatttagttgcaaagtttcagaaaatcaactcaaactggcaaagaaaactaagcaaagaaaacaagagggaattaaggatttattgacccatgaaaccaaaaagtccaggtgtgtcatagctttaagtgtgctggatccaggtagtcagtgtaatcagaaatctgtttctcccatctcttgactctgctcccctcaaattggctcagctcccctcaaattggctccattctcatggtatcagtgagggccaccagcagtcttaggtttacattctcccagctcaacaactctgccagaaaaaaagtgcctctttccccatagttcagcaaaagtcccagggctgagtctcactggtccagtttggtcatgtgcccacccctgaacaaatcactgtggccagcggtgtggaatgtgaggattggcctgtcctgggtcacgtgccactttgggagccagatccacctgaatcacagagactaaaaacaggggaagagtggttccccacagggatatgggggtgctattatctgatgaaggggaaggactaaatcctggcaagatgaatgtgtgtctgtctgcccctccctcaggcagggacaaagtagaaatctgacattggtcatcaccagagtagttaccccttaacttccccttcccccaccaaccatatatcctgaagacattgcccaggccacatctgtcttttaggagactgtcacagagagaaaagccacagagccaccccagggcctatctcgtgccatgtcctcgagggatggccttctgcaggatgaggaagaggaggaaggtacaggcaatgggactgggagtgaaattatggcctgaggtctgatcagccacagagaggctaaggtttggggttctgggtgtggtgcagtagtgtgcctttgattaaatggcttccctctgtgtgcccccgttgtcccctcagtaagtggggataaaatgccctgattcaccctcagagggatggaaatgtgtagccacagagtgggttcttgcggcctgcagaggaggcagctgagagcgaggaggatgacaacctgtcgtccatgctgcaccagcgtgctgagatcccatggcgagcctgcgccaagtacctgtcctccgccggcatcctgctcctgtcgttgctggtcttctcacagctgctcaagcacatggtcctggtggccatcgactactggctggccaagtggaccgacagcgccctgaccctgacccctgcagccaggaactgctccctcagccaggtgtgactggcggcccatggcagaggttgggagtggggatgggggaagggctgagcccatgggcaccctggaactccaaatcactctctgcctgtgaaggagtgcaccctcgaccagactgtctatgccatggtgttcacggtgctctgcagcctgggcattgtgctgtgcctcgtcacgtctgtcactgtggagtggacagggctgaaggtggccaagagactgcaccgcagcctgctaaaccggatcatcctagcccccatgaggtacccgtctcccctggccaggctgggactgtgagcaagtcactgttctctgagccttagtcttcccatctataaaatggggatatacaacctgtcacaagcttgtgggggtgactcaaggagacagtgtgtgtaaaagtgccctccttgtgcaagaagcagggagaaactggcatttactcagccagatactgtgataggcattgtgtgtggttagctcatttaattgttaccatggccctttaaagtgagcgtctgcacatccaagtaaagattgttttctcctccctaagtgggtgtaatttgcccatccccacccatgagttcagctccctgccctcccctcactctctctccctcagccagcctcaggttttgacactgggggaacaggtagctgttctattaataatttcctgtaatgggatggataaaaatctcaaaggccacttgatgtcaaagaggtttaaagttgtccctgcccaattggttggccaacttggcttaaaaacacaacaggcaaacagattttctggccccttgtcgaggctagacctcacaatctaactgcactttttactttccagcctcatgagttttctgtggcccacagatatggcctccaagtttatttacttttactctctatttgccccagctctgtagttctgaaactccctggttggggttgggctgactctgggtcagccagccggcaggctgtccccagggccctgttcctcttggcaggttgtccctctggagaggactctgtgtcccaggaggacagctgctgagtcaggccgagccggcagctgagaaaggcggcagtcgtcagatgggcttgagaaactgaaaggctaacgaaaggccagcgcccctttgggcagctgcaggaattcacggggatacaggccagatgtctacaaattggcagaggatgccagacccatgaatgactccagagacacttacatgaaataattaactatctcattcagtaaacaggaagtaaatcaatggacaaatgagtaactcttcctctggctgcctcttaggttttttgagaccacgccccttgggagcatcctgaacagattttcatctgactgtaacaccatcgaccaggtacagaggaccgtgccacactatccccccttccagagacacctcggacccctgggggcttctcctgtctgaggctgggttccccagatcaggtgatcacagccctctgggaagaagccagtgtccccgatccgattataatgctgcttcagggctggggcctccctcgtgggagcctcacagtaaggctgagggaaaccagatccctttagcttccacctgagatcccactggctttctctagtaaagttccagcatattctgaaccaaggtggctgattgtatggagaatattcattttgattcagcctgtgttctttatttaccattgtaccagatggtgtgaaaacaaaatcttgattcctacctcagggagtttaccttgtagctggagagatgagatacgtgcctataataaagggagagcaaggccgggctcagtggctcactcctgtaaccccagcactttgggaggcggaggcaggcggatcacttgaggccaggtgttcaagaccagcctgatggccaacatgatgaaaccccttctctattaaaaatacaaaaattagccaggtgtggtggcaggtgcctgtaatcccaactacttgggaagctgaggcaggagaatcatttgaacccaaggggcagaggctgccgtgaaccgagattacgctgctgcactcaagtctgggcaacagtgagactcagtctcaaaaaaataaaggatcaaaaaataaagtgagagcaaaacatggcggccagtagcactctaaacacagtcaataccaaaattcacctcactctctccccctcgtctccctcagcacatcccatccacgctggagtgcctgagccgctccaccctgctctgtgtctcagccctggccgtcatctcctatgtcacacctgtgttcctcgtggccctcttgcccctggccatcgtgtgctacttcatccagaagtacttccgggtggcgtccaggtgatggcctcaggggtgaggggtgggaggtgctttgcaatgtgcagtttggtgtacttgctagactcatcgttatgagagtaatagggtcgtgttccctccaaaaaataaaaacaaaaaacagaaatgaaggaaatagaaatatccacatcttattccaccgccctaatataatagtctgccaacacacgcacacactgaggttgacatctgaattatttccttgggcgatatggtcaggactggaattgctaggtcatgataaatgcacattttatgcccttcattcattttgccaacatgcttcccaggagggttgcatcattctagtggtcaggctgattgctgatgcatgaaatcggcgggcacctgattcaagcagtgttatgataacacctcccagcccacgtgagtccagagtgtagctgtaagccttgacttgagggagcctctcacagccattctcatggatcacatttgccctcatgagctttggatccatgcacgcctctttcctcctcaaaattttctaagaatgttctctagggagttctttctgggagtgattctcccagattcatagaaactcatagattcaaaaaattgtaggaaaaaatttaaagaacgtctaggccagtgtttctcaaactgccaattacagcccatcagtgggtcatgaaatcaatatcatggatcacaaccagcatttttttaaaaatgaaaaaaacatcagactgtattcatagagtaaagcaagctttgcttcatgaaacctttgtgttggtcatggaggtgtgtgagtactgatttgtgagataaaatatatttctgactgcaggttgtggtcagaaaggttaagtacctttcccaagtgcacatagttggctagaaactagagttgagatacttattagcaataataaaatttagatgcattttggacacaattacctgccccaaaggatcaacatttgtataaatggctttttgcttggatgatccagaatggcccgacacccacacgaacaacatagctttttgacactcaaaaaattcaaagtgctgcacaagctgttctacaaagttcatttcttctgccagagaaacagcccagtctctgtggcacccagtctgaccctggagatggtttatcagggaaatcaacttcctgcatcccaaactggcctccctggcactgatgtgcttgtcgaggtgcagctttggggagcaggaggcaattctgttgccatggaaacctctggccttaccccgagacgaaacctatcatttcagcacatcactggccagggtctaaagagctccttgatggggtaagcggaagacggggttgaacgctttgagtttggtcttctgttcctttggccagctgtctcaaggttcagattgttcacctgtaaaatggaactagcactgcctgcccagccttagctcagctccaggctgtgcagcagaagtacagggacagatggcgacctggggttgacaatgcccaggacagcagtaattgtgccccacatcaggctgtgtctaagcattgtacataaacgatctcattcagtgctcacaaaagctcaatgggctggtggcattgtcttcccccttcacggggtaagaagctgaggcctagagaggtaaggccattcacccacacagcggtagcaggtggagctaggcttcaggcccaggccgagccctgagcctgccctcttaactgttccactctgttccccgccacagggacctgcagcagctggatgacaccacccagcttccacttctctcacactttgccgaaaccgtagaaggactcaccaccatccgggccttcaggtacgagtccacattcccccaaggtaggagtggaacaggggtggggccagggggcacaggccatgagatttgattctcaggactccacttgggaaggccaaggacacgttctctctcaagctgcctcaggtcccaaggcccaagggatatccaccagcagggacaggccaggtgggctcccactgaatgttctagagaggaaaattccagctctgtagacaagcccaggacctctgtgaggcagagcatgaaaagagacaaagctgggacaagtcttcatgtatcaacgctagaaagggccttaggtgcgggccaccctaagcccttcttttattaaggagcccctgtgtgccaaacactatgctgagtactgtacaggccaatcccactcattctgcactgcaaccctcggtgctgagaatggtcatttccattgcacagacaaggaaactgaggcacagagacgttctataacctctctgtgtaaggtgccacaaagcccagacttgaacctatttgttcatgcaacaaacatttactaagccccgactatgtgctaagccccatgccaggcactaaaaagatgagtcaaataagccgctgccctgcaggcgtttacagcccagactttgagcaggccaggataaatccacgtgacaagtattctgaaaaaagcggattcaagggctgtgggagcatagaagagagacagtccgggaaggtttttgtaccagaggtgtcatcagaactaggactcaaaggaggggcaggagttcaccaggctgaggaattcctgaaaacttcagtgcccctgccatcgtctcactaccctgagtggtgatgttggggtggacaggagcatctgaggttgcctggggaatgagggaagctgttgtttcccactccccaagagtctgtctgatctccagaggcatctctcttccagtcaggcaggccagagacccctgacacacaaagttgggctcttttctcatcttcatccagagagtgataataggttatttttagggtggcacagctgcacgaagtatgacagtaaccatgagacaccaagcactgtgtccaggagtaaccatagggcacaaggaccagccaagggccagagaggcttacatctcctccccccaacccctgaagtccagcttcagccctggagaggtatccaggcccctctgcccaccctggagcacctagggccagtggaaatccacctcttagggatcttgtctaagtaaagaagagcagagcaaagctctgccctggccttggcgctgctccctggacatcccttgcccctggacaagcctatgctgtgtcttccacaaagaagcttgctggggactggattatgactctagagtctcctcccagcctcctcttctcaagcctgaacttctcccgttccttcaacttccaggtccctcgacattactgagcctagcctttgctctaagttttggtgatttccctctctcaattggtgtctcagagggccctggggtagagagatggtgactcttctagagtgggccacagccccttgtgtgcagatcccagcttcctgtaaacagcctcagatcaggccaaacctgtggtcagccagagccactgctacccagtgaggtcttccacaccctactgacacggtgaatgatttttaaatttgaatgaaaggctttttaatcaaccccatacacatttaatgcattggctttaatccagcagcctgttgagagctattagcacttattgattgcccacttactgtatgccaggcaccgtgctaagtgttgtatgtgcattattacatttaatcctcacaaggaccacataacataggtacgaatcgccacattctccagatgcagaagcgagacccagagaggctgggtaatcaatccaaggtcacacagactgcgggggctggcgctgagcttggaacccaggtttgcctgaccttctgggctttcctaagagatcttattttttcccaaaagagtttcaagagtgcccagcactgggctcagtggcgggctcggaggttgttttcgttcatgtaggaactatcacttccccatttttttcataagaaaactgagtctcagtcctgatacacagccaggaagttgtgatgttcaggctccaacctgggtttacatggctccgaggctggggctcttttctagtcctcagacacactgtcgcacgcctgtggcagaagctcccatctcacacttgccgaccctcaactcacacagtcctgagacccacatacgctgagcgcctcacactcctataacacgcacatgccctgatgcacacacattttcaacacgcacttactctacccttcaggcatggtttcacactcactgcagacacgtcaccctcccacacgtctccaccctgggggtgtgcagtagcatgctctctcccacctcagaacctcccttcagtcccctcagacacatgccctctctccacgcagagacaatcaaagctgaactaacaccttccagggtgaaaagcaaatgcccagtaaggtacgtcttgggtgcctccgtgtcccctgagtttggtcctatcaaaccagcgatgatgaggcagcttttctttcgttccttcctccatcatcaaacaagtgctcctgcatctcctctgggccgggcctacgtcagcaaggtctgagggaagcggccaaggagagtgatgacggcagcccaggttgatcagagaaaggaggcaggtccatgcgcagtaactcagggaaaacatgatgaggacctaaggatgagaaagaagcctccagagttccctgtgcagagagattccatcaatttcagagggtcaggggagtgccatgcattcatccaacaaatatttattgatagtgccaggtgctggggtatattggtgaataaaacatcttcatggaatttgcagtctattgagggagatgattataaatagctagagaaatgcatgtacagcagatactgtggagcaaacaggttgcagacaataataggggaaacctactttatagtaaggtagtagccaggaagagcctctctgaggaggcagcatttaaggcaagccctgaaggttgagttgagccagccttatgaagagcaagggcaaaagccttccaggaaaagggaatagtgtgtgcaaaggccctggggtagggaagactttagtattgtcacagagcttttaaaaagctgagtggctgcagcatagtgtgtggggtgtttgtggcaggaattaggttggcaggagggggttcttcatcctataagcagtggaaggtcattaatattcttttttatttgtttttttttttttttttttttttttttttgaggcagagtctcactttgtcacccaggctggagtgcagtgaggtgatcttggctcactgcaacctccacctcccgggttcaagcaattatcctggcttcctcagcctcccaagtagctgggattacaggtgtgcaccaccatgcccagctactaatttttgtattattagtagagacagaattccaccatgttggccaggctggtcttgaactcttgacctcaggtgatccgcccgcctcagcctcccaaagtgctgggattacaggggtgagtcaccgcatccggccggagatcattaatattctaaacagtgggggagaggacacagtttgcgatttagatagattaagccagccactgtgtggagcatggactgtagggagacagcaggtagacgtattcaggaagctgatgcagtagtccaggtgagagtttgtggtgggcaggaagcaggatagagggggagggaggcaaggactcttttagagagagacataagaggacttgccaaggggctgaatgtgaatccaggtgattcctgggtgagaaactgggtaaagggaggtgccccttattataatgggaaagacctagagaaaatggatcttggggtgaaaacaagagtttggaggaggtggggattctggacaggtttgaataagcagaaaggagtggggtggacattccagagagggatagcttacatgaagtggccacggtggcatgtctggggactggaggggccctggagcctccctctgcaggtagggagactcctaggagctatgtggaccaacactgttcccttaggagcttctcatcctccctccaggtatgaggcccggttccagcagaagcttctcgaatacacagactccaacaacattgcttccctcttcctcacagctgccaacagatggctggaagtccgaatggcaagtgctattcccctctaccctggcctctgataggagggtggggccagagcaagagcacacaggtacctggggatgaaagagaggataggataccagatcgtgtggacaccaagccttcctgcttcccccagccctggtggtcctcctagtgtctagcctgtgctccttttccccatatcactgcctggaggcttgtgtatctgaggtgtgtgccagtggcaagaacagttgtggtgaatgtgtatctgcagtgggtcatatgacacccacattgtgtgtgtttgtgggccagctgaggcgtgcatgttaaagggtgtgcaggggctagggggtaggggagcatgagcttgtgggacatgttggctcctggggctccagccttcgcagcccttgtgtgtgtctggtgacgtgtgcatgagttgcagggctggagtggaggcctggctgagctgctctctgccccgaaaaggagtgaggtagaacaggggcctgtggctctaacccctgagcgcccaggtcagctcctctccctccccaggagtacatcggtgcatgtgtggtgctcatcgcagcggtgacctccatctccaactccctgcacagggagctctctgctggcctggtgggcctgggccttacctacgccctaatggtgagcggcagtgggctagggcagaggaggggtcagacaccagcactcccggagcaccttcgtcactggagacatgagacactcccaggccttaccccaatttcatttgcatctgatgccagagggacagtgcgggcaggaaggctgaccagcaggccccagggcccaggccccagacaggtggaggttggggagccacatgactgaccctccctgtgcctccagggagggctgctctgagcaggcagtggatggcagcaaaaggaatctggggccctggcccctctccagccttaagaagagccattctggtggctgaggacagaactaagcgaccatggagtgtgcgccactggcttgctccccacaggtctccaactacctcaactggatggtgaggaacctggcagacatggagctccagctgggggctgtgaagcgcatccatgggctcctgaaaaccgaggcagagagctacgaggggctcctgggtgagaggctcagggagaggggtggggaagagtccaaggaggagtgtgtctgggttgggggccacaagggagcctggggatggggtggcactttcggatactagctgtggcccatgcctggtggctgagcccagcccggcccccagcaccatcgctgatcccaaagaactggccagaccaagggaagatccagatccagaacctgagcgtgcgctacgacagctccctgaagccggtgctgaagcacgtcaatgccctcatcgcccctggacagaaggtcagagcacgggcccaacccaatgctgcaggacaggcgtgagcaggggatggggcatgcacggagctggatggcttcgcagtcacctcgtggccctccagggccgaggcctctcactattcagacatcgcagtctcctgccctgggcctgtgggggcccatctttcctctccttctattgccttcccccagtgctgccctcaggccttgtcttctcactcatccaccaaggagaccgacactctggactcccccagctcacacgggctttgtcagggcctccctctctgcgaatggtcaggggctttccctagggcactgccccgagcttcagggcagggacctgggggcagacagcgaggccacccttgtattgagggtgagcccctgcctatggccctggcccagctctcctctcgtttcccactctgtctctttgtctctgtctcactttgctgtggctgtccatgtcattctctgaccttgggatgtacctctgtccctgcctctctcatccttctatgtcactatctgtctccgtattgtaatttctgttggtacccaagtgccaggaagcaacgggatcagaggtggctccattgtagggcggggcacacagacacatccatgcataccactctcagctgcccctgtgtcctcctgccacacccatgcccatagagacacaccactgccccccagctctccttcagccaagtacccggcacacccagacccacaccaaggcccaggcaaatggacatccatgcctgcacttgcgtgccggtccctgtgtaagccctctctggacccactgcaggaaacaagcccaaacctgtggtgtccaaagagaaactagtcagaaaaccaggccaaaaagataccctgtgacctcccacacctgcacacacacccagagctagcatagaggctattcccagcagccccagagtcccagtggcggtgcctgcttctctctttccagatcgggatctgcggccgcaccggcagtgggaagtcctccttctctcttgccttcttccgcatggtggacacgttcgaaggtgagttgtaaggcgggcaccccacgtgtacccacagccaccagatgaggcctcagccctggcacgtggtcagacatgacaggaggcccagcagtcaccgccttcccctgcaccctcactgggacccatgcagggcacatcatcattgatggcattgacatcgccaaactgccgctgcacaccctgcgctcacgcctctccatcatcctgcaggaccccgtcctcttcagcggcaccatccggtgagccccaccacccctcaggcccacccagccccaggccggctcagttccatcagatctggagcacaaagaggagggggttgggggagaccaggatcccagaggtgtttcctgctcatgcccttctccatcccatcaggcccaggcagcctctggaaggggatcccccacccatgggtctaagatgctgtcccccacccactgccaccacctcggtgcttctcccagccagacctccaactcagtctgctctcgctcactgccctctttgccgcctggggatgcaggcaggaccctgctccctccctactggggctttctgtgccacttccagatttaacctggaccctgagaggaagtgctcagatagcacactgtgggaggccctggaaatcgcccagctgaagctggtggtgaaggcactgccaggaggcctcggtaactactcctggctatgcagctgggttggttgggcactcaaggaccctgtaaggatggcagacagaagcccgtgtctcaggtttgccccaagtttggagtctgaagcctggcaggaccatttagtcctacttctcactatacgggggcccagagaggtcaggtgtcttgccccaggtcacacaactggtcagttcagggtctggctcctcctgcagggtacagcgggtacagtcagggatccttgtgagacagagattgcgagtcccccatgccaagggggcatcttcagccctgccctgccccatccacctgcatgcccagttctgccttaggggaggagaagatggactgggcaatcatagacacgggtcactcatcaaggccaccggtgattggcaaagccttggtatatttgctgcagctcctggagcattgggggtggccaagccttggtttcaatgaatcaccctaccaaggccctacatacacactcagtgcacccctcagtgcacacgccccctcccagaactgcccagggccacagcagcacacacctccaggggtgcccttctcgttgcagtccttgcagacggcctccacattgttgtgtcaggtgcaccagccctgcacacgcctgtgctcttggacacacacccacctatttgcccccatgcacacattttccaacagccccccaagccatcccatctgctccactcacagcacaagattaactcagtcctacttcatctccccgggctgttttcagatgccatcatcacagaaggcggggagaatttcagccagggacagaggcagctgttctgcctggcccgggccttcgtgaggaagaccagcatcttcatcatggacgaggccacggcttccattgacatggccacggttggtcctgggcccctccatgggaccatggtcttggaaagggtttagtgggatgctagggagaaatttgcacgaagtagtcctgaggctcaagttgcctctaacatcaaatgctatgtgttgcagaaaatgaaaagagctggggggaccctgactctgtctagtcttagggaatgttacacacacacacgcacacacaaaaacactatgcaaacacacacataagctgcacacacagacccacacagacttcacactgtcacctatcacaacagcacacacacagccacaaccacaacctacatacacacacagagctgagctcccaacaggctgagtccagtccctgagtgccgggaacctgttcagtcctgtggggtgggggtgggactaggatcggggtcagatgggagctgagccacagacctgggctccacatcccccaagccaggccagaccccatccactgggcaggtgagccaacagctgttgcccccacttggcaggaaaacatcctccaaaaggtggtgatgacagccttcgcagaccgcactgtggtcaccatcgcggtaaggggcccattgatggggtgcagagggacacccagggacaggactggcctgttgtggccgtcatcagtgcacagcccctgggcttgcctggtcccagtaatcaagaaagaaccctgaagcaggcagttcagggcaaggggcctggagggcatgcagggagcctgggttgcaggatttggggtggggggttttgcccctgtgcttccctcagacctcccctctccttctccaggttccaaggcctgcccctgtcccaaggccttatatgttaggctggcgttacttctccataggaagtgggggaggggttgtggagggtctctgagccttgaagcctggaggtggggtagagttgggacttggagaggagagaagggtggtattagcagatggagagcttgtagtcacatccaccccaggaaagtgcagtccccacagtgacaggacattctggccacatgcctcatcctcctcctccaagccgcaggagggccaccctcagctgtggcccccaccgcgggtggtattcccaccatcctgacccgccccctcctgccctgcccagcatcgagtgcacaccatcctgagtgcagacctggtgatcgtcctgaagcggggtgccatccttgagttcgataagccagagaagctgctcagccggaaggacagcgtcttcgcctccttcgtccgtgcagacaagtgacctgccagagcccaagtgccatcccacattcggaccctgcccatacccctgcctgggttttcta

SEQ ID NO: 15328 - DNA, 83908 bp, Homo sapiens
gaggcgcggcaggcgcgcggagccagcggagccagctgagcccgagcccagcccgcgcccgcgccgccatgcccctggccttctgcggcagcgagaaccactcggccgcctaccgggtggaccagggggtcctcaacaacggctgctttgtggacgcgctcaacgtggtgccgcacgtcttcctactcttcatcaccttccccatcctcttcattggtgagtgcgcgcagcgagccgcggaggaggggacgggagagcagggagggaggaggaggcgctgcgcgccgcaccgctcggcgtccccttccggcccgcgaccgccgtccgcctcgttcccggggtcccctgccctgtgtcctgcccgccggtccccgcactcgcacaccagctcatcccttcactcccccggtgcccccgatcccgcgccaaacacagcggacgtttgtgacccatgggatcaccaagttttgcttctgcagggccaagagctgggatggggaaaagggaaagaggaggtctcagcacgcagtgggaaactggagaggggtcgggcctcaccctccgtggcgcagcttagggagccgggtcacccctcccgcaaggcagcctccctgtcagccgcagctgggcctagggaagagggaagcctgtgctttggagtctgggatggaggcccagctaacccctatgctttcaccgggctgagccgcgcagtggtccgtgatctctgacagtcccaggcccgcgccctgggcgaggagaggcgagagctagggacttggattcccttcccccgccaccccacccgggcatgtgtctccagagcgcaacttctcaggctctgcgcaaagtagctccgactcgccgacgcagcgaccccggcgcccttgcttgcaaagttgggcgccacggccgggacaatcgtgcgtgcctctccactgaggtcccccccatctctctccaagaccttgactcttccagaccagtcaagtctatcaactcatagggtgtcccctgcatccccaaaacgtgttcattcactttaagaaaacaagcaaatcttaaaattcatatacagctttggggaagaaaggaaagattgtcacaaaattagatttacaagaggttgctgcagaagcagagttgctagttattaacaaagacagttagatagaaatagaaataaaacatacaaaatatgtgctcatatgtgcatcaaaaatcaaaaaagaacagcatttacacttctgttctcagccaaacggtttattaacctgatgacttgtcacacaagaagttagtatgtataatggggtaccttggcagggcacagtggcttacatctgtaatctcagcattttggtgggctgtgacaggaagactgcttgagtccaggagttcgagaccagcctgggcaacatagtgagaccccccccgccctttctacaaaaaattaaaaattagctgagcatggtgatgtgcgcctgtagtcccagctactcaggaggctgaggcgggaggatcacttgagcctaggagatcaaggctgtagtgagccgtgatcgtggcactgcactccagcagaggcaacagagcaagaccctgtctcagtaaaaaggtgtggtgggggaggtaccagcataggaccaggctgaatgagttggacgtttagtttgtgtgtaccagccttggggatcctcatgtgtaggtgtcaccctcaccatggacccaatgcccaagcacctttctggggttcatgcaccctcttcctcctccaagtgggcaggcatcctgcctctgactgtctctccctgcaggatggggaagtcagagctccaaggtgcacatccaccacagcacatggcttcatttccctgggcacaacctgcggtggatcctgaccttcatgctgctcttcgtcctggtgtgtgagattgcagagggcatcctgtctgatgggtgagtgactgtctgaggactcaggaaagtgaatctgctccagggtacttcctgaaaggcccaaggagatcctagctcacctatattccacaagcccatgtcttttgttactacatccagcagctcagtgtcttctatgtgccaacctctctgagctgggcactggacgcaagtgagtcccaggccctgccatcagtccaggagagcagagggaacacggacctgcatgccaagtcccagtgaaataatgctagagcctattagaatgccacaactccagtgaaaaatgtctggcctcttctacaacctgccggagttaccttcttggaaaaaaaaaaaaatctaaccatgccacccactcttgcataagacctttccttggttctcagctgttttgaagatgtggtctcagatcctcagcccaccattcaaggtcttcacagtcagccccacctatctctggcctcattccccatgcccaccttccgtttgggcctcacagcacactcctcacacctctgctacagcacagatcacactgtatgttaaagtttatgtctatttgcaaaactgtcttcagagtcagaaaggcctaagagttagaatctgagtcttgttcatctttgtgttcacagtgcaaggcatgtgataaacataaacattattcagtccataaacatttattgggtccttaggagaatgaatgaaaccatgttacaaataagtactctgggaggtgagaggaaggcagaattgggcaagctccatggttgagagggctttggagcggagtctggaagggtgactaggcttcagacacacagaggaggaaggagagagagaactggtggtgcctgagggaagggaaaaggcaccaaagagaaaagcaggtagggctagggagcagcgcaggggctggagcattaaacacaggctggggagcgatggaggctgaggctgggaacccaggttggggcatctcaggaggactgtgaatcccagcctgcatgtttgggtcggatttggtcagcagtttggaacagaagagagatgtcatcagcataacacttttaggtgggaacctgaggtgttcagcgcaggctggaggcagggagaatctagaggtataatagaagcaggacttagcattgactgcagtagtctaggtgagcaataactgcagacagaaatggtgtgtcagcagtcagggacagaagaggagcgggagcagccatctcactaaggaagaatccagtaaccagcaaggatgagagactgccaggagagggagtggtggaggagagggatatttggcttgagtatctgaggtccagcgccccctgagctggaatcagattatacccagactgcactcctgcagtgctgcctggctcctgtagttggatggcaggggataggctccctcatcctccctcccgttccccaccttcccttccccaatgtccctgcatcctggcttcagcagtgatctctaaaatacctgcttgacttggaggcagcagctctgcctgcttattaaagtccctagaccagcaagaagaccagaaggcatactgctacacaagcacgtgacaagtccgcctccacccccacccctacaccccttccaaagtagcacaaatgccacagtgagccctcagatgggaaatactcaccagatggtgacagagaaagacacctccgcccttggagaaggaagacctgggtcttcagtgagcactgctgctgtgtaccagctatgggactttgcacaagtcattcaggctttctgggcctcataagcatttataaacatacgataaaacattttagttgccaacttaaaaatgtgtgagaaagtataaggtgtttcaaaattatttcaaggagtaaagaggcaagagttttgaagatccctgggcagggtgttggctgttcccagtgtggccattcatgactgctctctggccttatgaaacaagcatcatagtccctggcttgcctgcttcatggggctgtggagggtgaaattcgagcatggacagggtgcagagcccggagtggcagagcactgggtagactgtgtattcccagaatgtgggaaactggaatgaatcggtccagggatgccctcctgctggctgtcagcagcccctcctgtgtgtggctgtactgcttcagctcagtgcaaagggccatctcctccccagggcacagatcagctcaagctgagtaattgtcatctggtctttgtgagctcctacccccaggcctgagtgaggggcaggaaaagagcagacaggagaagtcacagacccttgtgatacctccagtctaatccagcctgggttttcagagctgtctggaaatttagggggcaggtgggagggggctgattaaggcagccctgatttgatttagagtgagcctcatttagtgactaattaagccatcttaaacctgtagggcttcccctcttcctttgggtattatttctttctgtgatgttctgaattcagaacaatcaaaacagtataagttagtgaagaagatattttttaataactacaatattttcccagaccaccatacactggataaagcctgtatataaaactttacctaatttcttaactaattgaatgtgtattatttaacaaagcagctaaaaactattctatgaagccatgtcatgaaatatttagttcaattatggttaatcctcatcttatttcgtcttataaaattttaacatttctacctcctattgcaaaaaaaagcatttatatcagcatataataaaacatgtctagatgtcagcttaaaaatgtgtgagagagtagagggtgtttcaaaattatttcaaggagtaaagaggcaagagttttgaagatccccaggaagggtgttggctgtgcccagtgttgccattcatgactgctctctggccttgtctgtcttgtaccttctatattagtttgaagaccttttttggagaatattcactaaagaatatcaatatctaccatttcattaaaaaagaaatgtggagtttgccttttcaagttggtttgatgcttattgatgttttcagggacccagcctcttcccatctttccataccatcctgtgtgtgtgtgtcagcctatcttccccatggtcacaaggtggctgcctagctccgggtattgcttagcatgagcagagagggcatgctgccgacatgcctctcctttatgacagagatcattctttctttgacatctcactggccagaatacgtggaccaacactggcaaaggagtatggaattgcatggctgcttaaaccaatcaccatccattccctggggctgggtatattgctgctggagcaaacctgtggtcctcctggcacagaataaggggaagatactctttggtggacagcccacattgcctctacacttgcacctcagtcccaccagacccactgaggtcacaggatagctctcctcatgtccttcctccttctctgttgaactcttatgtatccttcaaagtccagcctggtgccacctcctctgggaagctgtccttggttgcccaccccctcctttgtgctctctcagtctctgtccatcggcagtatcacttccctagcctgctgactccaacagttagctctgagcatggcagccccctccataccatcagcttctcaagggcagggacccttggcacactggatagaagtagcctggtgggcaacagcagcactgaggcagcaagctgtagcaggccatctgggaatggagtgggtaccacagggctggagcagaaagggcaggctgggcagatctgataaagtggctggaggccacatagcctgggcctttcgttccaggctgagcagagtgggttttgctgtctgcaggagggagctgtggaagggcatgatcacgaccaactaaggtgaccctcctcaccaggcccagggaagactgaggcctggaaggaggctctggctgcctctgggtcttacccccaggccacagtccacccacttagaggcctctgtgagttaaggtggagagactatgagctggtattgactgctccattccccatcccgagagaggagacaaaatcagtgaccttggaaatgcctcttcgtgcctcagtttcctcaccccataaaatgggagactaagagtacccactcgatggggtttaatgaagattaaatgggttaacatatatcgcatgcttagaacagtgcctggcacagagtaaatgctccataaatactgactctcatcagtttgttatcacagcctctggggagggcgccagtgctgacttatgctgttcgtgttaaatggggctgtcactgggtgagttgtggcatacaggcccctgcactgttcaagagaccccagcaacccttgtgcttagggctcagcacatagtaaggcctccagatcatatacccagctctactccatgtactggcagctctgcccagcccataccccaaatacgcccattaactaaagggccctgcagcctataaagtgatgctataaaggttcagtgttcagcctttgaaattcaaggcctgggctgctctattgcagtacttagcatgtccccatcctgtctgtttctctctcccatctcagggtgaccgaatcccaccatctgcacctgtacatgccagccgggatggcgttcatggctgctgtcacctccgtggtctactatcacaacatcgagacttccaacttccccaagctgctaattggtaggtgaggtgtaggagggaggggcagtaccttcattcatttcttcagataatgtttactgaggactcattatgtgccagctattgctctaaacagtagagatttggaatagaaaaagaaaaaaatccctgccttcatggagcttacagtctggtgaaggaggatagacaggcaaagacagtgaataaacaagcaaacaaataggtggtggggatgctatgaagaaaatcaagctgagtaaggggtaggggcaatgacaatgttgctatctacacaggatggtcagggaagggctgtggtaactgtgggcatgcagatatttgggggaaggtattccctgcaaggggagtgacaagtgcaaagtcctctgatagggatagatttggcaaagatgtcactgtgggcaaagccaaatgagcaaggggaagagtgggaggtgagggcaggcgtcaggagaggagcgagcaagagtcccaggctctgggcctgagagcctgggtgaactgtggcatcaataactgatgtgacagaggagggggaggtgggctgtggtggggataaagttttctactgggggcatatcgagtttgagatgtcacagagacagccaactcaagtgtcaagttgggctttcatggggaggtcaggacaggagctacactttcaggaggtgggccttgtagatgacatctaaagcttgagcctggggctggctgccgtggctcacacctgtaaccccagcactttgggaggccgaggtgggcggatcacccgaggtcaggagtttgagaccagcctgaccaacatggagaaacccccacctctactaaaaatagaaaaattagctgggcatggtggcacgcatcggtggtcccaggtactcaggaggctgaggcagtcaaatctcttgaacccaggaggtggagattgtagtgagctgagatcgcgccactgcagtccagcctgggtgacagagcaagactccatctagaaggaaggaaggaaggaaggaaggagggagggagggaagggagggagggaggagggagggagaagaaagcttgagcctggatgaggtcacctggggagagaagagaaaggctctgggaccagagcttgaggtttgctaacatttagagagactcgggaaggactgcccacttagagcttctgagatgttaaatactgcaggactggggtcccaggcagaagcaacaggatgatggttggtgtttactgagcatgtgccatggggcaggctccatgccatgttccttacattcattgtcccacaggctaattcccccagcctccttattggtattgttaatatccccattttccagtgtggaccctgaaactgagaggttaaaaataataacagtaaatactcactttgtacttactgtatgccaggccccatcctacctatgtgatatattaattcatttaatccttgcaacaactctatgaggtaggtaccattattattttccctttacatatcagaaaactgaggctcagaggttaaataactggcactagtctagctcgtcaaggggcacagccgggagtctagcatctgtgcaatctcctaatcatttctgagactgcgtgtctaagggccctcagacttcgtccttggggtaaaggtatcaatccgcaggtctgcctctgtgttggggttcagcctgtgtgtctaaggctggggctgtacatctggcagttagactttgttcacactatgtccttaagtcagactgatttttaggtatcacagcatcgaattgacatttggagtctggcacactctgtgctaagccagtgacatcatggtgttgtcagggagtacagggtgtttcttgcactagtcacaggtctgcctttctgtagaaggtgggatctgagctccattaggattatccaggtgatccccctacccctagcccaggggcccccacatgagtatgaatgggagctgggggaagcaggttgagaggggagatgttaaatacaggcttcagagagccaccctgcttccatttctgaagtagctccttgtctgtagagaacccttcattaaccagggcctggctgaccagtgtcctctggaaacaccctgtctggacatctgaggagttcattttctcattctccagcaaacacataatgttctctctttaaagcacaagttatcacccgtggatggatttgtccttttctaaggaacaaagactaactccctccattccccttgttggagttatctccccttgaaaggacactccacagagccagaaattctagaacagggaaaagtggaggggacgtgcctgtgaactgcagggacagaaggaaatgggtattgggagaatggccagccctccaaggggctgatgtctggcctgggtatggagtcccacagaaaggggacctgtgatgcagcttacattgtcccgtgagggaaccatgatcctggaacccagatgaggccaaggaaatgttctctgaaaaagtcatatttgagctgagaactgaaggaactaactgggagaagggaggaaagagtgcttcaggcagaggaaacagcatgtgcaaaggccccaaggcagaaggaacaaaacacattagaaaattcagaagaagaagagtggcgtgggtgcaaagtggaggggagctggactttgggttttgtttgcttgtgcccaggctggagtgcagtggcaccaccttgggtcactacaacctccgcttcctgggttcaagcggattcttgtgcctcagcctgctgagtagctgggaatacaggcgtgtaccaccacactcagataattttttgtatttttagaagagttgggatttcaccctgttgaccatgctggtcttgaactcctggccttaagtgatcaggtctcaacttcccaaagtgttgggattacagccgtgagccaccgcacccacctggaaggtcataccacagatgtttgcctttatcccaacagcaatgggaagttgtgtgtgtgtgtgtgtgtgtgtgtgtgtgtgtgtgtgtgtgtggtttaacatgtttaacataaaatttatcatcttaactgtttttaagtatagtgttctgtggcattaagtatattcacagccgggcatggtggctcatgcctgtaatcccagcaccttggcaggccaaggcaggtgaattgcttgagctcagaagttcgagaccagcctggccaacatgccaaaaccccgtctctacaaaaaacataaaaattagctgggcgtggtaatgtacacctgtagttccagctacttgggaggctgaggtgggagtatcatgggaggctgaggagagaggatcagttgagcctggaaagtggaggctacagtgagccaagattgtgccactgcactccagccaagattgtgccactgcactccagcctggacaacagagtgagaccctgtctcaaaaaaagaaaaaaaaagtatattcacagtgctgtgtagccatcaccactatccatctccagaactttttcatcttcccaggttgaaactctgtactcattaaatgataactccccatttctccctccttacagcccctgacgaccaccattctactttctatctatgaatttgagcactctaggtacctcatctaagcggcatcatgcactgtctttttttttttttttttttttgagatggagtcttgctctgttgcccaggttggagtgcagtggtgcaatctcggctcaccgcaacctctgcttctctggttcaagcgattctcctgcctcagcctcctgagtaactgggactataggtacctgccaccacgcctggctaatttttgtatttttagtagagacggggtttcaccatattggctaggctggtctcaaactcctgatcttgtgatctgcccacctcggcctcccaaagtgctcggattacaggcgagagccaccttgcctggcctatttgtctttttatgacttgcttatttcactgagcataatgtcctcaaggttcatccatgttgtagcatgtattgaaatttccttcctttttaaggctaatattctactgtatggatatgccacattttgtttatctattcgtctgtcagtgggttgcttccacctcttgactcttgtaaatagcactgctatgaacatgggtgcattgaggggttttcgacataatcataataattgctttatggagaccagcttggaggagaacaagatggggaggaagtgtggaaaccaatgagaaggctctcagggtatagcgggaatacagaggacgcatgatgatgcctggacttaggtggtaccacagggatggagagaagtagatagagtcaagctatttaggacgtgaaatagacagcatttgttaatgggagaggtgtggggcgagggagaagaatagagggagaaggaggagtaatgggagctcaccagcagcccccatgttatgcctctttccttccttttccctcttctctcatcaggcattcagcttttgctgagtacttctgtgtctgacaacaggctgagcactcagcactgcaggacaggactatgcaaaaaacctctgggcctagtcctgggtgcactgctaattccctgtgtgaccttgcacaagacatccaagctctctgagcctcggattccccacctgggcaggaagagtaagtccctgcctaagtcatagggttgtaatgaagagcaaagcagaccatatctgttaagtgttagggacaagacaagcatgaggcatattttcaagtctcggctcctgtaggcagctctcactaagggctaaagggcttctgatgcctgggatagaatctgtccggcagagtggagtggaggcagggggacagccttcagctgtggaattcctccagtcctagagaccagcctgagctgggggacattattccagtcctgaggcatgagagcagaaggccgatgcttctgccctccatcctaatgtcctcctgcagggacccaaggtggatggcatcgatccccccgggtgagctcagccctgggcgcatggtggggcccaacatctcaacctgtttcctaaccctgagccaggcaggacagatcccagatttgtgcccaagagatgctctggcatccatgcccaggcccacatagggatagagggcagggtgaaagtctctctccctcactcgggtcctctggagaggggctctgtgtcatgaagctgaccttatccgcatctggtctaggagggaggagggaaggagctgccagtgctaaaatctcccccaccctcaaagggggacttcacaggttattgctggttttggttgttggaagctgacagtgatttattggcagattgaagtgagtgtgtgtgcgagaatttaggatagaatctactgatagcttctgaggtttaccttccccaggtcttaaatctggagataataaaaatataacagctaatgtccaaagagcacccgctgcgtgtgaggctcactgcactaaatgctttccatatgtttctcacaagaaccttctaggtagcactattatgattcccacttaatggatgaggaaactaagctctagaaggctaagtgactaatccaaggtcacacagctattatgtcacaggctctgagcccaggtgtatctggctgcggagccaccaccactaacccctgtataacgctgcctcacagaactgtggctggctctttccgtatcccccatgcccctgctccatcatcatgctgtggtgggctctgaactgtgaggacagggatccaggctttcaccctctctctgtccctagctgccagtgcacttgggcaaggtcacatcctatttctgggcctcagtttcctcatctgtaaaatgaaaggctggattgaatgacctttaagatttccctcacttggaaattccacaagtaagtcattatagcatggagcttgcatgcatgggctccagcgtcaggccagcccagctctgccagttaatgggtgtgtggccttggatctgttacctaacctttctgagcctcatttcctttgtctgagaaattgggggtgacggcagtgtactttctttgaaaagttatggtgaggaatagataagatcatgtgtttaaagtgcttacttggcacagtgcctgtaacttagttaaattcaataaataaatttcccattcttcccatgatcatttatttttaagggacatttgtctgaccagtttgatttatgagattattggtgtttttcatgaatgttaagacgtacgtgcgtcatcttagagtcatgtactctgatatattcacacgtgcacatccacttactcggaaatgtacacacccaggcacgcttattctgtctccttctctgccacatacttgcacacattatgtgagtgtacacacatgatgcacacacgtctctgcgatcttccatctctcctcggcagccctgctggtgtattggaccctggccttcatcaccaagaccatcaagtttgtcaagttcttggaccacgccatcggcttctcgcagctacgcttctgcctcacagggctgctggtgatcctctatgggatgctgctcctcgtggaggtcaatgtcatcagggtgagggtaagcaggccacctgggccagggtggggtgggaagcagaggctctggcctctgtcctgccctgggttcaggcccccaccctgcttctcagccaaactgagaagggatcagcttgttttacccgcccgtgtaaaggggagtggggccgtggcggaaatttcaggatagacactgcatctggcccacgtgtgctctaccccagggtcccagagggagaggggggtgatgggtgtgttcgctgaggttggcggatgactttccgtagaaagggaagataagcatcaggcactggcctctcctactttctttcttcgggggtgggggactttgctttaatgtattcatatcgtcacgctggtaaatgaatgagtaagtgttttgttttcctttctgtttgctcccgcctccctctctcttcctcaccccagactccaaccttccccttcccctgcccctacctccccaggcagcccagactaatgaactcgtttgtctttcccatgctttgtttttattagtataataccatatgtgtctgtctaaataaatacctattcaggttttttcctctcaacacaagtgaatatgtaggtttcccccacggtatttatcttgtaagaatgggatcatattatgcagttttctgcactgtgcttttctcacccaacaaatatctcttgggactccctccaagccatctgatatggctaattccgttttcttaatggctgcataatattccatcgtatggatgagccataatgtgttcagctatttctctatggatgggcatttactttgttgccaagttcttgccttcatgaataatggtgtgttgaacatacttatatatttatgtattgctgcttttatttctatgggagagagtccaaggaatggcgttgctgggtcaaagggtctgtgtattttaaattttgatcagtgttacatattgccttccagaaagactgtaatctgccagcaatgagtgagaaaaccctttccctgccttccaaccagcagtgagggctacagccctttcgaacttggactgcctgcatttctctgactcttctgcttttagttggtgatctgcagggcacaaagctccttatgtgtccccccatccagtgaccctcacaggaaccctgtgatgcaagcaccatcccctttatagatgaggaaacattttagatgaggcttgtccaaaaacaccttgctagtaagtggaggaggcaggattcaaaaccaggtctgcatgacttggagttctgtgaactgtatatgaaacatggtggtatccttagatctgtggagaagatagcatatgagagattcctgctcctccccaacccaacctaaacccaacccagcctagccatggggggttcaaagtcgacctcaatgagcagttacaaagtcaggatgccctgacattggtggccaagaagtgttggggaatccttttcctggtaataattacaggcgaaagatggccccatctgttagagatcaagtgtggaatatcacaaccccagatccttgctggggcaaggtagggagtggtgagaagttggacttacccatcccccatggcccatgtgccccacagagatacatcttcttcaagacaccgagggaggtgaagcctcccgaggacctgcaagacctgggggtacgcttcctgcagcccttcgtgaatctgctgtccaaaggcacctactggtggatgaacgccttcatcaagactgcccacaagaagcccatcgacttgcgagccatcgggaagctgcccatcgccatgagggccctcaccaactaccaacggctctgcgaggcctttgacgcccaggtggtcagtgggggcacagccacaccatctattcactgccttctggtttagggtcacagagagggacctcaaagggcattaggtcaaaatcctggtgggacaagaggggaaactgaggctggtgaggggaagaagcttgccttaagtcacacagtgaaccagggacaggtgcagggctgaggattcataggacaggcacagttggaatggcccttaccgtttaggtcgtctagtccaaagtccttatccagatggggaaactgaggctctgagaagggaagtgaccccactggactctcacatccctgtgctctttcctctgcagcttactgactataaaggttggagtgttcacttgatttggagcaggggtgttagtggcctgatccttatggtaactctatgagttgagccagacaggaatctccccatatcactgaggagcaaattgaggccctgagaaaggctgtgacctgcccagagctggccacagctggcaggcggcagaggcagtctcctggctcccagtccagtgctccttcacttcctctgccctcgcaccagggcagttgctgaggcagacacggtggcaggtggtaatgagtgagtgtggcacatggccacctcctcattccagtgctgtgctcatcacatagtccctgaccagctgtgtgaccttgagcaatcatctggccttagtttccccatctagaccatgttggtgttgatagggccctcccaactgtgcacttgctgattccatgatctcttcctggagttcacctatttgcagaggatgtgaccactgggtttccccagacaacaggagctaggggcatcctgggaggctaggcccagccgtgaattagccctcaggcactctgacctggccatggtctctctgggcagcggaaggacattcagggcactcaaggtgcccgggccatctggcaggcactcagccatgccttcgggaggcgcctggtcctcagcagcactttccgcatcttggccgacctgctgggcttcgccgggccactgtgcatctttgggatcgtggaccaccttgggaaggagaacgacgtcttccagcccaaggtaggcagccccaggggtagggtaaggcaccctctagatggttttcagttgtttctgagagtgcaacaggccaatgtgtgtgagccatggccacactggagtggctcctcacacatgcgcaaagcccatagcagtatccccaccacagaatactctacatctggtcaacagaaatgccagagggcgagcctatgccccaagggtatcctactctcctctcaccgtcactaccatagtacctctcccggtagttaggtcagtccgaaaactgcaggaagtgcttttgtttgtccagtgtctagagcttctgtgacttggatttgttggctttcagttcatgtcatcttagtaaactctttaaaagttttcaagatctgtcttcttcagtcctgtaaaggctggcacttgagctttctgcaggggcatcttgggagctactgtcagaggagagagaagtgggaaaccctcacgagtggagctttgtctctccccactccaaatttcattcaaagctgcccgtagttttattaatatgttggacttttccattaaaatttcttttttaagaaaagtttccatggcttaaaaaacactggagacttattagactagattatatccaatggccttggcagttgtaacgattctgcaaactgaaatttgttggagctagaaaacctttccccggggttatttgccctgcgtggggccgtagcatccacttcgggggctgggcagactgtgctctgttgtctgtttccttgcagccgtttaggtttaaatggccacaaaatgaaaactttttcacccctaataagtttcagagttttagtttccaagtgaggatgtcattataacattttaaccacagacagtctgaaaataatgcagagaatggggaattagggtttttaataatttatgacaccctttgcgtaacatttgttcatctcatgagctccaaaatcgcagccagcagttaatcctcaggaggtttatgttcatttttctggagacataattagtcagctgaacagttttggccacagatatgagatacgttgagtctgatttatgcagcaaactttcattgaacactgctgtgtgccaggcctgggttgggctgtgggaatatgaaagcaatagttatgatgaggatgattaacaatattaacagccacttactgaccacataatacatacctggctgtgtgcaggagttatccatgtgttatttaatccctaaaactatcctttggcgtgagtatattttgcaacatctttactgtggtatacctcaaatactgtacagtttatgagatgataggtattcttatccccattttacagatgagaaagttgaggctcagaaagtttaagtaattttccccagggtctctcagctagttaataacagaggcagaatttgaacacaagactcactccacagtctgggcatttacagccaggaagctaaattgactattattatcaagccatcacctctggctccaaggattatgaaatccaacagtgaggagagaaatcaaaataaaatacttttatgctatgtgttacatgtgactcttaggaggaatattcagggaattgtgggaaaagatagtgattaacttagccagtggtcatgaacagcttcatagaggaggggatgtttgaaaggggtcttgacggatgagtaggaatttgccaggctgccatgggaagatttcttgctcaaccaagaatgcaaggaccacttttgcttatttaaactttgatggcttttgaagccatatctggctttttgagcctctctactttacctggcccataaaagagaggggaagcggctgcttctcttgtctacaggagtgtcacctttggctctagcctgaccataggctaccccagaatacccccattggcgatcctgaagcagcatggagccagttgttaatatcagggggaaatggcacaggccagagcccttatcagagtgtccacaccacgctcttcttcctgtgtttcccaaaacccttgtgggattctgctaaggagagagctctgaggcaggacgtgccaaagagatggcgaaagcacttagaattttagttcatctgaacgttatcattgccgtttttttctctttgtttatacacaaaccctggggtttattaccgtctcattggaatgctcttgtcccagttacttagcacacaaatccctgagacagatggccctgcctcagtggcagtgggccttatcagatttaatattttttccctgcagcccaaacacaatcagaaaatttccgacacagaaacaagagttgaaagtaaatatagtctccagtgtccgcaacaaagaactctccatcatgtggttgcctgggatgtggcttaattctcatgtgggcttctgagctcagaaaatgggggaaagggatcatttactgagatcatttggttcatctcccagcccccaagccattctaatccagagagaaccgagtgctattctggtctttatgaatgacaaagaaggaagctccctagctacatgttgcagtgtttcacagtctgggagaggaagccgttttttctgcccagcctgaatccatcctgcagcagttggcacagcgaggcacctgtggtttattcatcatcactcttccttcctaagatactcagagttggcaagaaacatgtcatccttggtatccgcaaggacgaacatttctgatgtcctctttagttactgaaagtgtctgtgacttgccagatctttgatgctcctgtcaccccgctgccactccccagggaaagctgggacccaggttgggctctgcctatgatctatagctctttccagcctcctctccaacccaacccctactcccaatctgtcacctcccatggatgccactgatctggctgaaggacaagagaattagattcataatgagctgctggtgtctgaaacctgccagcactgccctgggctatcagttgagccaaaggaagaaggaacagtctgggtttgatcgaagggctaaagcttcaaacagcctctaagtctcagtaggaaaatgtgtaggtttgggagggtgtatgtgtttccgaatgagttcccctaagaactgcttatggttctatatgtgtgttctgtttgtccctgtgtcttttggtgtgtctttttctgcgtgtgtgtgtgcatgtgtgtgtgtctatgcccccgtttggattgccatatttgtggctatcattatgagtgacttaatgagtgtatatgcattggtgtttctgtgactttgtggttttgatgcatgggctggcctcttcataaccatgtccatgcagctggtctggcctagagtacctgccttcaattcactagctccttcttggccatcaagactctgctcaaatgtcacctgctccagggagccttcacctggttgaattagatgccccttatctgtgctcacataacatcctatcaaagcgccctgtttctttccctgacttgatcctctgtcccctattgcctgacctctgtgtgcccagcactcagcccactgcctgacacccaggagatgcacgggaaatggttctgcaaagaaggaataatgcagcaattactatatattgagtgcttacacttactgttttttcacatgcactgttacattgacttctcataacaactctctgaagtcccttcatagcctcaccttacagatgaggaaactgaagctaagagaggttgaggaacttacctaaggacacagtggctaatatatgatgagtcaggacctctaagtccaggctcttaaccaccgtgtcaaacagtcttgtatgaatgggtaggtgtgttggtctctgggtggccaaagataattttattctttacccagggcctcccggggctgggacctacggacaactcaccttttgacacctgccaaaataggaaacaagagtccaagtgatcccctctcctttaagcaccagagaacatgtgaaggggacctttccaatcatacctctggcctggcagagacaatggggctccaaactgtagagtcgggagtgctgggttttagtcctacctctgcagctaactcatttattctcctcagcagtcacattctgcaagcctcaaatgcaaaatgtgtaataacttctgtagaaagtacatgggggcatgaagatcattggcttgattgcttttaaaaaatcggtattgagcactactggggaaatccctggaaacaaacacaattcttccctgagagcttgtgaaaatgcaagactagggcctatgattttccaaagcattttcttccaccaagtgtcaggttgtaggtccttggtcttttctctcttgccttggtacctgcagggtgctgaccagtgctatcatatcccctccccgtttcctaggaccctcttctcggtagactccaacagggcctgccttccttgggcagcatggcaggcctcttggctagtctagtacccacttcttttttttttttttttttttttggatggagcctcactctgtctcccaggctggagtgcactggcgcaatcttagctcactgcaacctctgcctcctgggttcaagcaattctcctggcccagcctcccaagtagctgggattacaggcatgcatcaccatgtccagctatttttttgtatttttagtagaaacagggtttcagcatgttggccaggctggtctcaaactcccgacctcaggtgatctgcctacttcagcctcccaaaatgctggaattacaggcatgacccaccacgcctagtcaggtacccacttcttaactgaaacttagctattccaggttctatcccttttaaaccaactctttgaagagaggtctaataatgacccaatgacttatagctgcagtgagatttttattttaacaggtcacaaaattctcaatccacaaaagtagatttctgaccctaggttattttgttgggggcggagagaggaagtcaaaggttttgcagcctttagagctgcaaaaccagaatttgttgttttgttaaaaatgcacaaataccgacgagtatatttaagtaacacccatagtctaacgaacaaacatgatcagttggcttttccagccctcattctccagcctgtgtgttttctgctcattgtaacacagcgtgtgtgtggcattccatgtttctccagagctttcatgagaatcagtggtcttggatgcatagtgttcccatgagtaccttaattacctaaccattccctgtggttggaaatttatatgggtttttgcattctccttctgctctgaccccaaaataaatgtctgtgttcatacagctattaccttatgtgaaattattttctttgggataaattctcatgatgtgttgttgctttaaaatagtggactccagtctccagagctgcgtctctgcagaggacagtgggacagaagaatcccagggcatgttaaaaaggaccgggtcttcctaaacccacatgcctatatttctgacccagtaccagccaggggggcaagtttccatcccccacaagtcacaaacctgtaactgacactaggatgcttaaggtcaaaggcctggacgaggcctagacagtgggtctggggtagtgtttttgacatcactcaggttcatgttcacatgttgtccccttaccagcatgtgaccttgggccagccactaaccctactgaaactcctttttttcatgtatgaaatggggctaataatggtaccctcctcattagggtattgtgaggatagagttttgcacctgataaatattgtctcctgccccttcctcccctggaaattcaggtctctccctgcagcctaattttaaggcccatttttctgcttccagcccacccctgcccttctaccttcgacctcctccctctgcctctccctctggtgcactggcaaatgggacagagagcctcggtagggccttcctcttagagtcttgcacgcatccctcagtggtctccctgtggctgcttcctgctgccaccaacagatacagacccctgtcgcacagatcatggtagagacagtggtgagcaggaccagacagctccagggagcagtgagggctggcttagagaacctctgttaaactgagaggccaccatcaggaagctctgatccaagatccaggaatccctgactctagggaaaggcctccaatgagagcctgggccctctctgcctgattctgattgtggatgtgccctcaaactccttctcatcactttgttccatccctctttaccctgcagcagctcccacaccctgccaaacaggatgcacagtccagggcagtgtctgagaaagagcagagatctgtcttcatggaaatattgatgtggctctgctggggagcaatggatttatcaagatcaaagttttcctgggagttattgatgcttaatttggaaatagacacactgttgatccctggtatctttagcaacaaagttaaaatgtttgtttttcttcactggttgccatctgagatcttgccggaagtacacaagagaaccttaaatttaacaggaggccctgggagcccatgaggctggcgggcttgggtctgaaatcttttcagtctcttgtaagtgatgagctctcattctctcctgagagctctacggtgccatgttttccactggccttttctgctcagtaattgctacattacaggctgttggtaagttcggaacaagggagctgctgattccatttctgtagcagagaacatgcaccgtgagacttgttgtaccagttcaggttttaggtgctctatttattcttgccccattcagaatgctctcccctgggtctgtggccacaatgctaagagtcatatttatgggcctgcagttgtaattgggccccattctgttcccccaagtggaaagatgaacagggtgtaagcaaccttccctgtagttagaaaaacgtttagttggatttatcagtctgatttttcactcataaacaattgcacaagcctttgcaagcccagagggtcttgtaataatgatggccgtggtccattatggcacagtgatgtgttctacggtggtcattttgctggcaatgacagtcacctctgaacttctctttccaacagacacaatttctcggggtttactttgtctcatcccaagagttccttgccaatgcctacgtcttagctgtgcttctgttccttgccctcctactgcaaaggacatttctgcaagcatcctactatgtggccattgaaactggaattaacttgagaggagcaatacaggtacttggatgattattttttcactttgccataagaaccattattaggaataatgtccatgagtgttattcatcctcatggacactcaagaataattctgctgtaaatttattttttgttgcccattaacgatgttttaaaacagtaaccattgacaaggcagtgtgggatagtggaaaatatcttgggctgaacttgggagacagtgtagctctggctctggttctgccttggactgggtctgaaaatccagctgctcagcccttggcttgaaagtggtagacgtcactaattgatcacagcactctttctgaccaagggtaaatgcaaccttggaatcctctctaagtggctgttccagagttctgctaccagacagtcttctttgggtgtgaaaaaaggaatgtgcttgacatacaaggtctagatagcctctaagacagggtcccctctaagatggggtattggtccatggcctgttaggaactgagccacacatcaggaggtaagcagtgggagcaagcattactacctgagctctgcctcctgtcagatcagcggctacattagactctcataggagtgcgaaccctattgtgaactgtgcaggcaagggtctaggttgtgtgttccttatgagaatctaatgcctgatgatctgaagtggaacagtttcatcctgaaaccatccctctcccccaggtccatggaaaaattgtcttccacgaaaccagtccctggtgccaaaaaggttgaggaccactgctctaagttctatttgaacccttaagtcttgctcactaatgagagtgacctatttggtctgttgggtcacttaagtctaggctcttggtcctgccttctgtgatttccttcttagagtttctggaaagatgatcaaagccagggagtgttcagggcccctctgaagaaggtgatgatgagagttgtccaagtcccagggtcttcactaggattttggttcagctatcagactagagagacatcctgattgagagtagtttaaatgggatagaagtttgtttattcttcagatagagtcagggctgacacaggagctactcaatgatcagagacctggcttcttctgtcatgttgctctgccagccttcttttgtgacttttgtctccatagccatggtgggtattgaaactgccactatatttacatttaaactagccagaagaagggacaagaggagggaacgcattttccttttaaaatggtaatacctgatttgcacataccctctcgcatcccattggtgagaaagtggccaaatggccgtatctagagagtctagaaagagcttggtctttattcttgacagctatatatgcactgctagaaattctctgtgcaaagaggagaatgggcattgggaataactagatgcagctatgcctagtgatgtccatgaagttgtggtaaaatcctgaagctaccttgttctttggaaatgttcctcagaatcattaacattagtcatgtgggagacaggagaagaagctctgcagaaaagggaccgagaggacaaggatatagcttgggctggggacaatgtcagagtccaaactctggctatcttggaatagtctgtgtgaacggtgccctcccaagttgtgcagtgcacaacctgtgcagctatatatggcaaccctgcccatccccagtggtttctcactgggaaagcagagtatttcctcagggatgtcattatgtgacaatagtggaaaaagcccaggaaaatctaagaccttctaagactcatgggggcccagagctgggaggaaccaagctgttgctcagttcagaaaacttctctagaaatcccagcctctcctcacacccctccagtgacaggcagacttgcaccaccacaagcaacagccacttttgtggttgggcagttttgtaattaaatatactaatgtgtgtatgtcataaattacattttccaattatgccaaaagagccaaaaatggttttttaatggttagcatataatcgtttttatcaaattgcttgaatctttcatgttaataagagagattcattactatgccacaaaaagcaaatactggcattaattatagaaacaaattaggggggtggagcgcaatggctcatgactgtaatcccagcgctttgggaggctgaggcgggtggatcacaaggtcagaagtttgagaccagcctgaccaacatagtgaaaccccatctctactaaaaatacaaaaattagccaggcatgttggcgtgcacctgtagtcccagctactcaggaggctgaggcaggagaatcgcttgaacccagcaggtggaggttgcagtgagctgagatcgtgccactatactccagcttgggcgacagagtgagacttcatctcaaaaaaaaaaaaaaaaaaaaagtggctcatgcctgtaatcccagcactttgggaggccaaggcgggtggatcacaaggtcaggagatcgagaccatcctggctaacatggtgaaaccccgtctctactaaaaatacaaaaaaaaattagccaggcatggtggcgggtgcctgtagtcccagctactcgggaggctgaggcaggagaatggcgtgaacccaggaggaggagcttgcagtgagccgagatggcaccaccgcactccagcctgggcgacacagcaagactctgaaaaaaaaaaaaaggaaagaaagaaggaaaggaaaggaaagaaaggaaaggaaaggaaggaaagaaagaaagaaaggaaagagagagagagaaagaaagaaagaaagaaagaaagaaagaaagaaagaaagaaagaaagaaagaaagaaagaaagagaaagaaagaaagaaaaagaaaagaaaggagttagggagaaaaaaaccctttctttctttcttttggagatttccggaaaatgtacccttacggatgagagcctgtgtcttcatgggttagagaataaccacgctttgtgcataaaaagttattaagcacaattcctgaattatacataattactagctgtcagtcagttgtgcatttctgtgtatgctggtcttcacttaataagactttatttcacagatcacttggtgtccctacttcactgaaactaggtgattatcttttgaagtctcatttcacataacctaggaggtatatagatttctttaaaaatgtcattgccattattttaaaccttacccatggtatatataaacttacagaaagacagaataggttcattattttaaaccttgcccatggtgtatattagctcacagaaagacatagaataggttcctgccttaagaaaacctgacccacaaaaaagcctgggtttacacaaaagaggaattaagggcggggagcccaccttacaacagaatgaataatagaattttatccaagagcaggcatcctgaggacatttaagacccggatgcatttttccttgttcaagagcacacatccaaaaattgcagtctttctgcgagtcatgatcactctgcacataaagcgtttaggttcagagctcggggaggccattaccatggctgctctctgtctgccctgtgagggtccttggggtggctgcactctggggatggtgctggggctgactgactcacgcggtcgtgtaacacatcagaccttccaaagtcgaacccttgttttgtttcaaggctcaattatgacaggacttggtctcagagcagatcccctccctaggctggagaaggccactttaaaacagatggcctgccccacttcatcatttttatggctctgatctgtgttctccactggcctctggtaaatcaagaatacaagtggacatgaagatctgctttaaaaaataaagaacagaccgggtgcggtggctcatgcctgtaatctcagcatttggaggccgaggtggatggatctcctgaggtcaggagtttgagaccagcctggccaacatggcaaaaccccatctctgctaaaaatataaaaattagctgggcatggtaggcacgtgcctataattccagctactccggaggctgaggcatgagaattgcttgaacccggaaggtggaggctgcagtgagctgagatcatgccacttcactccagcctgggaagcagagcgagactctgtctctaaataaataagtaaatgaattaaattaaataaaaataaagaaccaattaagtcctgtctacaggaaaaggccttacttgctggagaagtagcttgctgtgctggagtagactagtaagttggaacggtgatacagtaccaccttacagagctgctctagggcaccatggggactgtctgagaagcccctggcacactgtaacaggtggcatctggtgtggtgatgatgatgagaatgatgatgaatgtgaaacactctgctctcatttctagaccaagatttacaataaaattatgcacctgtccacctccaacctgtccatgggagaaatgactgctggacagatctgtaatctggttgccatcgacaccaatcagctcatgtggtttttcttcttgtgcccaaacctctgggctatgccagtacaggtactagatgggctgaggggaagggaggggggcagcaggacacacaaccagaatctgctggtccatggccagtaactaggagcacaccgtcttccactccatgcttgcctgtacctttcacacacttggctataccacaggctgtacctctgggtccctcctgtcccatactctgcaagcactgaccatctctcttaatgaccagagaaggcagtatcattaagactttaaaaatggagccaactttataaactatagaaaaatcaagccaggttcaggggctcacacctgtaatcccagcactttgggaggctgaggcaggaagattacatgagcacaggagttcaagactggcctgggcaacacagtgagaccccttctatgcagaaaaaaaaaagaagaaagaaaagaaaaatcgtacatggaatgcccacagatcttaaaagctatgttgtagcaaaatatttaattacatcaaaaagtgttagtgatgtatttttaagcaaaaagagtaagttacaaatagtatatgttgtatgcttactactaaactggaatatatgttatgtatacatttgtacagattcacacatgaaaaagaattggaaaatcacatagtgggattataagtgatttttattttctttatgtgtttctaaattctctaataagcgtgtataagatttggaaatcaacaacatgatacttttagcctaggcaacaaagtgagaccctgtctgtacaaaaaattagctggaagtggtggctcacaactatagccccagctactcagaggctgaggtgggaagattacctaaagtccaggaggcagaggttgcagtgagctacaatcacaccactgcactccagcctgggcgatagagtgacaccttgtctcaaaaacaaacaaaacctggtgttttttagccagatgtggtggtgcgcccctttagtcccagctacctgggagtctgagatggaaggattgcttgaccccaggagttcaaggctgcagtgagcaatgatcacgcccctgcacttcagcctggacaacagagagactcctgtctcttaaaaaataaaaataaaaacgttaaaacatggtatttttttaaagcaagacaacctttggtgctggctcaggaagaggtacattaccccccaataatcagaggagaatcgtcagcatgattgatctgacctcgggcttcatgtgtcccatctcccacccggagctcttccaccacagagtctgatcctgtcctatgcctgggactaaatcttcaccctggtgttcaggccagaaaccgaaatcccagacccattcccagagggcgggaaggttccaccgggagagcttgatgtagcagaaagtgacttgggtgagacaggctgattcaaatacttaacctctctgagccttggtttctttatctatgaaatggggaggctgcccaccctctggagttgctatggcaattcagttagataatgtaagtaacacagcaggcagagtggcccccagagtcttcacttcgtaaatatcagatccctctaccttgcacatgtttggtatgagtgaggtgttaccaatccagaatccattgcttcttgggataaagattccataaaccttcatctccagtgatttgtattggtcctccttacttgtaaagcttagagtttaaaaatattaaaagaaaaaaaggggagaggctcccacagggacacagctagacaagatgagatgcagggaatctgatgttcttttttatgggaacagtcatatatgccatcccccattaccacctacccatgcccagactgcccccgctccattctgccaagacagatcaatgactataaaagctacaaaagggcctggagatctcatctagtttagttaccaaccaaccttttatgcacaagactttctaagctgggtgtggtggctcatgcctgtagtctcagccactcaaaaggctgaggtaggaggatggcttgagcccaagagttcgagtccagcctgggcaacatagagagacctcatctctaacacaattttttttttgaaacatgaaaaatgaagatttctgaccatgcttctctcattagttaacactttgggctgtgagggtctgatgcagagagacacagcctgggaggatcctaacatgtacacagcattcaaaaggctacaagacactttctgttgtgtccccttgaacaagcagtttgtaagattttgttggccaggcatggtggctcgctcctgtaatcccagcactttgggaggctgaggctgatggttcacctgaggtcaggagttcgagaccagcctgaccaatatggtgaaaccccgtctctactaaaaatacaaaaattagccgggcatgatggcgtgtgcctgtagtctcagctactccggaggctgagacaggagaattgcttgagcccaggaggcggagactgtggtgagctgagatcgtgtcactgcgttccagcctgggtaacagagcgagactcggtctaaaaaaaaaaaaaaaaaagaaatcaggttttgtctactaaacctgctgcacggttaccgttactagtactcacagggtttgttgcacatgcatcgttgctaatagtgctaactaatattaacagcccttgccctatgcctggccctgtcccagcccccctcccttgtataatttaacccttgcactgggggtagagattttcatatctactgatttcttacctttgctcatttatcatggagtgtcctttggttttctgtgtttgtatatacctttaccacttatagatttgaccagcactcaagaaccagtgttactcctgggagttaatacaatcccagccccatggcaaagaaactcatgtggttaggattctgtgtgcagcctggttagccacagggcacgtaaggctttttataatattgacatgagtgcagaagccccattcccgtgtaagccctgagggctcttgtttcataatctttttttggtcacatgcacacagctttattgagatataacccactcatttaaagcatacaaatcagtgggttttagtgtcctatattcacagagctgtgcagccatcatcacaaatgtggaagttttcatttccccaaaaagaaacccgtacccattggcagtcactcctcatcttcgcccccagcccttggccaccgtttatctacacatacttttgaaaggctagtgaaactttctcagaaaaataaatgcttgctcaaacatttgggctataatttcaggggcttcatgggtgcccccctgacatttatcaagaacaccaggttaaggaatttagctataatggaggcctctgtgtttcccagtctcctgggtatcagaggcccagagagggcaggtgccttaccctgggccacgcagtgaaccagtggcagcaccatactcacacatctcctttctgcggttccccagtgacagagttctcaggaagctttttcatttattttctgagaggagggtaggccatcttgtattgatctccaactatatgccagccacaattctaggtgcttatcataaaggttcatttaatcttcacaatagtcctgcagagtggacagagtccttcagagtgggcattataatcaccattttaaagatggagaagctgaaaaccagagaggttaagtaactcacccaagactgcacagcaaaaggctggggctttgaaactcagggccacagactccaaagactatgtcctccccactatgctagatttttttcctaacctgtgaataggagacaaaatagtccttttatttctcacagttgctttgcacactcagaatccatgatttcttctgcatgagggccattcagacctgtgcagaagagagtaatggaccaaggagtcttgggagcacctaggaggaggggatgggggagcatgaggaggagccagggaacagcagcagctgcagcaccagctcccaccccagcctctgccagtctcttggaggtggtgtgggtgcagacaccggctcacaaggtgccctgttagtgagcttggggtgccatgggagccttcttgttgtcaggcccaacccaagctggctgaagaacaccctgatggcctccatttgagcacaactaatgaaggactggatgccagagataagtccaggagggtgatgctgcagggcaggccagggaagagggtacttcatctctatcatggtcctctgcccatccatgccagcatctaacacctgttaaacactgggaggcaggtggtgaaggggccacttcccagcctctaagatacctcctaagccaggaggcattctgtgattaaattacagggcctcccacttactcctttatccttgaggcggtgctggaagcttaatgccaatctggtgtagggctctgggactacaggaccaaggcaagcagtcctttctctctctctctctctttttagctaaggaagccagcacatctgttctttgagaaaaagccctgtatttagaggtgtctgcctttgaaggcaacctgagaaactgtcatcttggcgctttggggactggccatttacacttctcataaatattcagaagtaggcagtcatttacataaagctaaatgcagaaggaattctcttttcagggaatacctggcagattcattaaaaaaattaaagaaaccaagagcataagaatgaaaagcgaattctcggaccccaggctggttttttctggcatgggtgcagtaactttgcctctttgctcagttatcacttttttccaatgacagtaaccataagccctgagagccagcaaatagaacaaaaggtgctgtcacaaacattgtgcaatctcatctctgagatttccatctggaaaatagactggagagagttaaggcttcaaccagccttgcagataaatgcagttagttaccagcccagcaaccctctgcttgcatgagagcccattatgctaacctccttttgaaattgctttgtttctcctccttccctgcactccactccccaagataatttggaaacctgggcaccaaggcttgtcccactctaggggactggggaaacagggattttgccagcacctcctggcagggcaaccatcaggtcaaagggacctgacccatgaccccttcctcagatcattgtgggtgtgattctcctctactacatactcggagtcagtgccttaattggagcagctgtcatcattctactggctcctgtccagtacttcgtggccaccaagctgtctcaggcccagcggagcacactggtgagtgcccaaaggtgtgtgtgttttgtccctcttcccctccttccctcgacagcagcaggtctcctcccacacacccacactgtcattgactttgactttgactttgagtaggccacttcacctgtccaggcctcagcttctttgtctgggaaatggagtcaatgggggaggaggctgcctcccggtgaggacaggaggcgggcatggcagtgacagtattgacactcaggccttcctctcgggtgggagacggagcagaagcctctcccctctgactcggggacccctgcaggagtattccaatgagcggctgaagcagaccaacgagatgctccgcggcatcaagctgctgaagctgtacgcctgggagaacatcttccgcacgcgggtggagacgacccgcaggaaggagatgaccagcctcagggcctttgccatctatacctccatctccagtgagttcaccccacacagccagccctgggtgctgctgcgtacatgcaaggagagggtgtcagagctcgggtaagagggggtgcagggacagaagcaggaggccttgagattatccgactcagtaggggagcctcaaactggctctgatagctaagctcccagaaatcaaagtactcttcattcatttatccaacaaacatgcatggaaagcctgctatgtgctggacactgtgctggccctcaggatacagtgatgaggaagagagatgaagtttcattcctcatggaactgatatgttattgacagacagcagcaagtaagtaaatgaccacagttttgaactctcctaagaatgaagactttttagtaagtcagactgagctgtcattgccctggggaagctacaagaaagcttccatccacttggggctatgcaaaagaaaaagactagttatccttaaatatcagaagcccaggctgaaggtactcacaggtgtagggactgaatttatattaaccaagtagtttgggaaccccaagccaaggaagaagaaaaagaccaaaactggtaaaagtcctagagtcccatatacttgaaaccattttactgagaatgtaaaacttttttttctttttttgagatggagtctcgctctgtcacccaggctggagtgcagtggcaaaatctcggctcactgcaacctccacatcccaggttcaagtgattctcctgcctcagcctcccatgtagctgggactacaggcacacaccaccacacccgactaatttttgtatttttagtagagacagagtttcaccatattggccaggctagtcttgaactcctgacctcgtgatccacccgcctcagcctcccaaagtgctggaattacatgcatgagccactgtgcccagcccaaaagattttttagaaattgaaattttagttatggaaattaattcagtgaacaatggtcccctggtcagagtgagggcttacggaggtcaggtgatccatggagtcctggcccaagtttatctcacagttggtctcgtggctccgtggacccatcccatggtggttacttcccaagtgcataattgggatgtagatatttagcaaccagctgacttcacactagttccctgacctgtccagtctaagagtcattatggccaagtggaagcccctggaaagaagaaaacaaaaaagaaaccaaaacttactcagtgcacaggttacatgaatgagtatagctgaagagagaatttttgaattagaagacagatgagtggggattacacagaacgtggcaaggagagtaagttggtagaaccattttacagatgggaaattaaggccagaggggagtgtgttcctgagatccctcctgaggttagtagcatggctcggactagatcctccaaagtctcttaactcctggtctcaggctattttccacaaagagctgggggcctctgtggggtgaagaagacttaggacaccatggggcaccattatgaggccatttcctcctaggagaaaaaaaatctctgggctctgaaaggagtagaattagggtaggaaattaagagaggctaccgaccacctcctccaactaaaattggttcttttggtgccaggaagagacacacctggtgggggagggaaggtggtaatggagggggtgctggtagtgtctcccagatagacccatccaacaagtctcatggagaatgagacggtcactcaggtcatctgcgtattcttggcattcttgctgcctagagagagagtctgatggagctaggtggccaccaagctgtcccactccccaagacagtttggaaacatgggcaccaaggcatgtccctgtctaggggactggggaaatatcccatagcagtgttctcacagtatggggctggccatgaataccccaggagtccaacctccctttgtccagctagaccatggtgtcctatgcctcaggcagggaatgtggtccagtcatcagtggctgggccgtctgccatacatggtgcaagccatggcgttttatgcagaaagtcctgctagcatttgattttctcagaatggagctgtgagcatggcaggcaaccactgtttcctggattcttcaccaagacaccccaagttcctggtctctccccgttatcctcatccctgaccctgtggttctcagagcctccaaacacactcaggctaagcactccatagacaggggaaatttggaaggaacatctagggagctcagaaaagccaatgtccctagccccaggcccacttcaaccttctctctgtcagtcctgcctgcccctggaggctggttacatgaagagtaaccccctgcttgtgtatagccccccagttttgtacaggtttagagacagttcccagcagtaggaacagctgccgaggtgggagagggcttctcccgatagccgggggacttcctctcccaggaacaacagggtggggtagagcaggcttgtcgttgctgagatagagagagggaagggaaacaacaaggaaagtgggggcactgggtccccaaggttcctggcacagcaagcagtgaagttggggcagcctcaggtcatgtagtgggggcaggtgacatctgctttgactgctcctaagagatatgtactcatctcctggattccaaactgcagcctgggacatgttttcttatataaacagcatcaaaagatgtgtgagttcccaggctagcccactgaaccctacctagtgggtgctcattgtcccccagagcccccagaagacaagccgtggctttgtgatgggcctggggccaggaggacctagggatatgttgtgaagagctgagaagactctggaaaaaaggggctctggagccaagcaggagcccgcccaggactcctcacgtgtccaagtcacctagggagagaaacagagcagcccaggttggtccctggaagagagcagcggaggaggggaaaggggagagcccctggggagagctttgaaagtcaagtgctgtttgctcagtgtgtttgcctttccgaggatgtgtttttttttccctccgttagtcagcagtgggagggggagagagacgggtggtagggtgcagggtacctcctggctgcaggcatatgctttgagtgcgtgttcatttacctcctctggacttcctgccttctgttaccagggatcaagacacaggtcattaggcgtgaggtaatggggcatctcttgttctgacccctggcgccagtcttggagtcctgacgctgcagaggagccccagagtcacatttcctgttggggcccatcctgctcatatgcggcaccatcagacttctgggcaggcaagattacctgtgactctgtctgatggtctcgccatcaatatcactgagagtagctgtgtatggagtcccgaactggtacaggataaaacagggggctgaaaagggaatgaatgggcacagtttctctggcatcaaaagtcacatccagaattgatatttcctgttgagtaaaaatagaaatataagttgctcagtggatgttgagtgagccctattcatgtgccccactctgtgccaagcaccaggaaggagggaagggaaaaatgataagatgttctccccgttctccaggagtttatgctccactaagaagtcagagctaacatgcacagaacagtgtggcagcgagagcagaaccgtgtggccagctccatgcttgccgcctagcaagcgtgattgcacttcatcctcataacaacttggtgaggtgtgttgctctgttgtcccattttacagcagagaggactgactctcagtgaattgaaatgtctcagtgaggtcttccacagcaaaaggcgaagcacagagaaggaagtccatgtgggctgggagttcacccagagattcatgtaggggcaatgtgggctgtaccttgcaagatggtgggatttcaatgaggagaagacaaagtgggaggaagctggagacaaggactgtggtctcttcctttagaagtcagttcaatctttttttccttgtggaagcagcataactctaggtggttcctctgtatctgaggacaagctttgtagaggtgacaaaggggtcctaggtcctatcaggcaagcactcgatatgctgccagttcattctgtccattgtgagatacccattccagagcgcttcctctgtgccaggctctacggaggttctggatgttaaagaggaagcaggcatggccctggccctcccagtcttgtgggagattgatcatgcccatgaatagtgaccatgtggtcagagccacagggtcaattccaaatgcccctgtttctcttttgtgttactcacctgactctgggtctttcgtttcttccattcattttttttaaacaaatatttcctgcccaccttctgtgtgccaggcctggggatgcagtgggagaagcctctgtcctcctcagtggaggcgctaactcagaacaggcagtggagaaaaacaacatgacctggagacctggtgccccttccttccccagcatctttgaaattcttttggttgttgttgttttgagatggagtctcactctgttgtcaggctggagtgcagtggcgcgatctcaactcactgcaacctctgcctcccaggttcaagtaattctccctgcctcagcctcccaagtagctgggattacaggtgctctctaccatgcccagtaatattttttgtatttttagtagagacagggtttcgccatgttggccagcctggtctcaaactcctgacctcaggtgatccacctgccttggcctcccaaaatgctgggattacaagcatgagccactgtgcctggcctgaaattcttcaatatctacctgcccttctgccagttggtgcagccacagtgggctgcttatgcatatcctggcctggcttggtggggagcatggctgagggagagccggggcacccatcaattaaggaggtaaagatcagtctgactgagatgcctcctgccacacttcctcagctgccagcaactgacaccattaacctgatttccttccccctctgttgactgcactgactattggactgaatgggaaacagccccgtgcacctcaaaatgcacttcccctcctgcagatgcatcttgcaattaggcccaaactgtgagcctgcatgctcctcccctggccctgcacaggcaacaaagctgaagttaatcagaggtacaaatggctggctatgcctctctgacacgtaacttctggaacatgtatcaatgctttggaaatgaaaagctcctggtattgcaatgccaggctggtgcccataagggccagaaaacattccttgggcaaagccagggggagtgggtgatctgatcccagctcaggtttgttgatttgttgttttgtttgtttcgttttgtatggggcaagggttgagggtatgaaaaacttacactatcatttactaccgtagtccccagaacccagcacaccagcacaaggcctggaacagggataccttttttgaatgaataagtctttttttttttttttttttttttttttgagacagagtttcactcttgttgcccaggctggagtgcagtggcgcgatctcggctcactgcaacctccgcctcctgggttcaagcgattctcctgcctcagcctctcgagtagctaggattacaggtatgcgccaccacgcctggctaatattttggtatttttagtagagatggggtttcaccatgttggccaggctggtctcaaactcctgacctcaggtgatccacccaccttggcctcccagagtgctgggattacaggcgtgagccactgtgcccagccttgaatggataagtcttaagggatatttttggaaaggatattctaaaaaatacccatgtctctacactattgcagaagggctttcagttttgatggcagcctttcaggccagcctacacgcaactaaacttttccataacagcatcacacttacacaagaagaaggttttataatccacttgccattatttaacatagttcttcctccttaactttcaagatctgagcactataatgttcttctttttgtttttgtttttttctaaatcaaattaaggtgagtcacctcaccttgggcctgagttggacagaaatctattcttggctatattccccacccctccaccaccttggaaccttatagaactttatgtggttcaggaaaatgagggcgaggcctcagatcttcaacccatgacagctgtatgcccagctccctgccttcctgtcttacccccagctagggcacaggactgactattgtgcccagagaggtgccagagcctgtaacaaccccagacttcccaggtccagccacatccaccccagagccccaaaagatgatcttcagagagacctttaaaacacaagtagctggtcacttccatccagaccagaacccaagatggctgtgctcttgctgagacatgttggttgtcattgcctccgagcccactttagccctcagctctgtaccagaaatgctgttcctttgggaatcacagccaaagaagagatggagcagttctggaataagaacacaagttcaaactgtcccatatctccccacatcactatctacagttggtctcttcccatggcgatgtccatctgccaccgtggcactggtattgctttgagtgcaggggtctctctttttggcatgttggccctgttactccctgggaactttgagtcttatttggaatgcgtgaagtccctgtgtccggggccagcactgatccacacagctaagtttgcactcatcttccctctcatgtatcatatctggaatggggtctgacacttgatgtgggacctaggaaaaggcctgaagattccccagctataccaatctggagtggttgtcccggttcttactgtactgtcctctgtagggctggcagccatgtgaagaacagaggttcccagcatcatcttcctacacattattacattcacccatctttctgtttctcacttttatctccagcctgggaaaagttctccttatttgtttaaatccttttgtgcttttagatccccttggagcagtagagtaccttgtagaccataagagtggaaaagggtctagttttctccttgtttctaaagatggggtggctgaaaaaactccccttttttgcctacagcttgcctctctgggcctagaagtggttattctgtctccatattggcctttgatttgtgctgagggtcagcttttggctccttcttcctgagacagtggaaacaatgccagctgtgtggcttctgccctgggggctgggggtgaggctttgggtgccactgcctgtgggttgctggcttaaaggacaattctgttcattggtgagagcccaggccattaacacctacgcagtgttattgaaagaagagaggcgggggtggaggggaattagtctatcccagctagagggagataaagagggctagttagttcttggagcagctgctttgaggagaaaatgtatagcttttgacacaacaggaagatccagaaaattatcattgaacatattaaaggttatttctttttcttgcaaaacacacacacacacacacacacacacacacacacgcgaacacacgcagctgatgattctactctcccagccccagccctgaaggggacccagaactccctgcacaaaggctgtccttcaaggggagggtgaaagaagtggaaaatcacattttcattctttagcgtctccatacaacagccagaactgggcagaagctaattatatcagaagcatactccatgttgctgcatcagctttgggatgttcatttttaaatttatttatagcttgtctcattcctcaaaggagttcagggagctacaaaaataaagacaataaaattgaaaaaaattaaattaaaaaaaccatgaccagggaaaatgtgcagtagaatgaagtgtcaattatcacgttttctgactgcaaaatctcccccacggctgatgcaccatcatttactacaacagcccctcttgttggacatttccagtttatttcgtttgggatggtttgttgctgttgctgtggttgtggttttgttttattgaattttgtgttagctgcagctaataccatcttgctgatggctttgcgctgctcttgaatgattactcaggataaatttcctggagacggattataggatcagaaggtctgaacttctgtgtggctctagctacaaagcaccagattgctttccaagagcgttgtagcaatttataatccaacactcagcctattttttggctgggagtcaagccccagaatgtgaaggaggggtcttggcctggagcaggggctgagggatgggtgcacaggacccctccttattggttatttatggggatgggccaggaggagcagaatagaggcccctgccctcccagttgctccttggagtgactgaccccataggggaggggcgaggctacctcacatttagaactatgtagttggtgatggtcaaggtcctaggtctgatgggcatcctcctccctctcctcctcagccagtaatggctgcactatgtcgtatgtcctagatctgggtcccttttgctgtgggaacaccaataatacttacgctgtttcctgccggaaacggtgcaggagggctgtggcatggtagtgggccctggaaaccatctagccttcatgaggaagggcagttaaagcacaggcatgtatgatgttggtattgattaaaagcctcacgggcagagaaattcgccatctgccagggccccagccatacgagggctccagccatacatcctccaggagactgggacctctccaattgcaggagccttgccttccccatcagattaggaattccccgaggatggggacaatgtccttcccacctgcttgagaactcctaaggggcatgtactctgtctccccattgtatctggaacttcctgggagcatagctcctgtctccgtcctcagactgggaatcccctaagggcagaggccatgtccttccacccacttgggattccctgaagttggggaccacatctctgatgtacaatgctttgtatgtactgactgctgcaggattcttggagtaaatgggcagtcaacttcttggactggtattgaccatctggacttcatcagagtgtccaagactttgccattcattagacaggggccatgtgcacaggcagagccctggcctctggcttctggctcctgactcctggtccctctgctttaatttggctaatggcagaaccagactcctttctgggctgccctggaaggggatccttgaatgaaagaggatagatgggaaggtggcagctgacatggttacctcttatgccatgggggggctgctctctctggaaatttaggcctggggtcagggcactgttgagcattttacaccctaggccagaggaggggtgacctgtggagcagggctaagctagtagcccatgaggtatgatgtgtaggcagcacctggggctcacagagcctgttacccatgttatctcctctgaccttggaaagagctggggtgtatgaacaagtatttataagtttacaaaaatcatatgaggaaactgaggcacggggaaggtaaatgacatgccctaggttacacagcttataagtagcagggattctgcccttctgtcacaccaagtcccactgtcttttcttcctggagtccctgtgactgatctaaaggccacatgtttaacagaataaggaggaggcctctgttgcagcaaaccagctaccccacccgcacacagactctaagggacatcctgctttaagctgtccttagttactaatacctcagtgagaatgagtttgaaattttctcaagagccatgggagactaggaagtctctaagcttcatagagagcctggcttggggggacacaggagccaaaggcagaggaagaagtggcagctttgtgcccccagaaacacgtgctcctgacctcacagttggccacagccagccaactctcccatccttctcccaccactttcccgtggggctaacttcaccctgtccacacggagtgacttaacagtttaagccccagagtcgggggccggggtacctgggacaagagtcctgagggaaatggggtgaggaactggaagtgccacagggctagagttctgcccctagcctactggagctgtgccccacaggctggccccactggactgcgctgcctccaagccatcctgggcatctccatgtgtagctgtcacgctcctcccactaaacgcctccctgtgcttcctctgcagttttcatgaacacggccatccccattgcagctgtcctcatagtaagtggatcctttctccatctcttgggggtagggtggagggggagggcgtctgcagtgacaggctgcccagatttggcctttctgcacaggggcctcagaagacaggctccacagccagactgaaaataggatcgaaagtttatagagggtgtggcccctccccaactccagccgaacaggggcctctgcctccaggcctggaagaccggaggcttagtatttagagaaattaaactttcttttaaaaaatagctatccaaatttttaatttttaaagtgaaacatgtgtattgtagaagtgatgggaaatccagaacagaaagctcaaagagaattaaaatcacccataatcccactggtaacatttttaatgtgtttctttccagtctttttttaaggcctatgatatgtcattttctacaaaaataggaatgtgctatgcatgcagttttgcaacctgctcttttaaatttaggaatatgccacacacaattctccatgccactgaatattatgatggtggctttctaaagcaattttgataaaagctgtgtgtgagctgagccatgggggtcaagcagcatgctcctacagaaaggcctgggcccctacgagcctgcagccccctcacccagcctcccatccccatcttctgtgatggctgcagttccttaaaaagatctgcttatttcccccggggccagtgtccctgagctgtgtagagttcacagcctgtcggatacacttgggaattcacttccaatgtgatgtattgagctggttcctggcctggctcctgggggaactgtgggtaacagaggccactgagccagccaggtggctggggcaaagcactgtgcagtttcgtaatcactctgtttacgttatcccgatgaggactggggagatgagcaccccgcctgctgtctgcagagggggccgtgctgacctaacccgagatctcctccctgcttattcccagccaagactgggcaggacagggagtcttggccaggacagggagggagcagcccctgctctccagcttgaagtcctgaacttgttggggacgtttccatgagatgactgtggggatgatgaaggtgtctccaactaaaagatcctcttaggagcctgctccctgacagccctctcatttcccttccagtgctgagcgtttccagtgtgggagggacccacaccctgggccaccctggcctcacttgtgcctctgtccacagactttcgtgggccacgtcagcttcttcaaagaggccgacttctcgccctccgtggcctttgcctccctctccctcttccatatcttggtcacaccgctgttcctgctgtccagtgtggtccgatctaccgtcaaagctctagtgaggtgaggggagggtccgggcgagggcactgggcaggcaggtcctgtgtcagcctcaaggcttgctcgagtgatggccaaaccacagctgtttggtcccggaacacacccccattgctgggccttgctgtagctggtcctggttggtcagagggacattggcctgtatggtttcccagctcgccatccctgagcaaggacttgcttacatacctcccaggagaggggactcactgtcactttcacgacaacttaaaaaaaaaaaaaaaccagtgttgagccaaatgtggaatcctcctaaattctacccactggtcctaacttcaccctccagagccaccaagaatgaggccatcccgtccccacgtggctgccccatggatatcagaaggcatccactgtgtctatctttcccaggccaagtatcccctaccctttccacagcccctgagccctcacagcctcagccagtgaaacagcttcccccaagcgctgggtcctgctctgattggcccacagctcttggaggctcccacttccaggctctagagcctcatggggactctgccactgtcccagaggcattgccctcttgggaatgaaagcctgaaggtagaaggctgaggctttggctgggaaatgccctgtctggagtgagaagatgtccttgggcctctgaagtagctctgcctccttgaaagcaagagcctgtcatgcctctatggagggctggcttgtccttacccatggccagagaaccagtcagtaacaaatgtcctctgtgtcttcagccttgaggaaggtgacacccctgtctcatgggaccctggcaggtactgggaagctggaaggaaggagtagctgttggaatgaagtagctgatagagagggtagcttgcagggggagactctagcatgggttcaaagatggaatggggcataactcagcaaaattatgctctaaggagtatctgaccaggcagtagctggttaaacagggattagctcccatttccacagtcggctgtgctgactcagtttcttgaccagggtgttgtggggtctgaagatcacccctcctcccaccacccactctccagccctatgattctgtgtagaaaccacagatttaagaacgctgcacctgcctgaaaactgttgcactgatcccaaagcgttcatattttcaaacactctggatcccactgtttccaggaatggaacaccagagtagcagaggccttttcagtgaggcagctcaggctctggctgaaggtgggcgcaggacactacctgaagcttcaccccaagagatgagggccagctccactcttcccagtcaccgcctgtgggggagggaggctggacagggcatgaaggcagagcctggtggtctgcccctcccatctaggggtggcgcacagaaagggagactccaggccacagctcacttacaccccagaataaccttgccttgagggtgggatggcttgtctgccccaggcctgttggacatttagcaaaagagaagaaaggggaatacaaacaatcctgagcttcccagaaagctttcacacctccaggatgggagagaatgaactagaagagtgaagcttccagtgcttcctcaggtccacagggaaatctggacaggggagagggtaggaatagccgcctcccccgtgagtaatgacacctcctccagcaggctgttatggggatccgattacataatgctacaaaacagttaacacagtgtctggcatttagtgtatgctcacaaaatactagctattgattctttaccaatcctagtcctaactaaccttaaccctgaccaatccaacaccaaccatccttcagtctaataacccagactaactaacttcaacattaaccctaaaactaaccaatctcacctccaatccagaccccagcctattccagctgactggtcaaccctagcaaaccctggtaacaccaattacctgcccccatgcccactggtctgcccccttcagtgtgggctttgtgggactatacttcaggcctgagatcctgctcagagctctctatcaggctgcgccctctcccctcccctctgcccctggcaggggtgaggggtgtctctgtgcttcccgagcagcgtgcaaaagctaagcgagttcctgtccagtgcagagatccgtgaggagcagtgtgccccccatgagcccacacctcagggcccagccagcaagtaccaggcggtggtgagtgcccggcctccccttgctactcccagcatggtcctctaaggcccaaaacttgggcctgctgtgtcggacttctgccttttttcccaggaagaggggctcccttccctacacagctcccagcccagtgggtcctcacctccaaaccacccccagcccctcagggttgtgaaccgcaagcgtccagcccgggaggattgtcggggcctcaccggcccactgcagagcctggtccccagtgcagatggcgatgctgacaactgctgtgtccaggtgagtcctgctgccccatgcctggccacccagcaccaactcccagagggagctcagcacctggaaagccagaaagctgcatgcttagtcctctgcagaggtcaccctgcctgcctgtacggtccataggagtccagaaaccagggaccaccaagtggggggacccccagccttaggcaagggtcagcatgagaaggccagtctcccactcccctgctctggaagtgatccaggggctggaatcagtgtcttttggctttcatggaggaggggaagccagagactattcactgggaactggctgcctttctgttctctcctgggcggtgggacacgcctaatgaagatcatgggaggctacttcacgtggaccccagatggaatccccacactgtccaacatcaccattcgtatcccccgaggtatggcccagtccacccctccagcatgcccctccccatgtcccactgaataacatagagataaaaagacaaagctgcatttattgagcacctactctctgctcattcttggtgtatgccctgggtatattatagaaggggaaggctacattctagaggcttccgtgtgctgggtgggagtgaagcactaaggacagggtaaaattgccagccttaatgtcaaaccatccattgcagacagtataggtaatgcacaaaaagatcagaagtgggtagccaaggaacgcaagtggaagtgatggggtttctgagaatggacaaaggccctgaggccatgaggcaggaggattttctggcagaggcagccatgagcaaagtatggaggtgggttggaggtgggacccaggatggtgtttcttgggaccacaaggagcctgggctcatactaggagcatgggaaaggagaagcgagtgcttaggaagggtggcggggcaggaaatcagagagggggaaggacctggggagccagaggaggatgttgatttccagaaggaaaggattaaagagggagaggacttgctggggattctaggtaggaagaaagaaaacaggggccccagggttgggtgcatctgtctgtctgtctttctgggtaatggttgttcagactcccccggccccactcacatctgccaccctccctccctgcaggccagctgactatgatcgtggggcaggtgggctgcggcaagtcctcgctccttctagccgcactgggggagatgcagaaggtctcaggggctgtcttctggagcaggtaatacatgtatcctcagggcccagtggaggggaaatctccttttaaccatcctcctcagttgaggatgcacacacatttattggagggcccactctgtgttcagtgaggactcaataaatgctgctaatggatattctcatcatcatcactagtacgtattcacctcttactatgcgcaggttctttgctaagtcctttgcatgcattatttcatttaatttttatgataactaacaaggtccatactgttctcaattctcatttatagaggaaggttaaactatttgtcctaattcacacagctaataagtggcagagctggaattgaaactcagttctgtcagactctgaatcccatggttactcagatgcacggcagtaatttcccagtgtgggaaattgcaacaccaacattggtttccagcttggtcctgagctgcactgacctacacaccataagtgggtgttctgaagatccagatgtaaccaataaatgttggtttctgggcaaagatcactgtcttaattaaagagccagaaccccaggctcagtcaatcacgaatctgttatttatacccacctacttccaagaagcacttgaaactagttgatgaaagattcatgtaaaaatcaaaaccacaatgagataccatctcacacccgttagaatggtgatcgttaaaaagtcaggaaacaacaaatgctggagaggatgtggagaaataggaacgcttttacactgttggtgggagtgtaaattagttcaaccattgtggaagacagtgcggtgattcctcaaggatctagaaccagaaataccatttgacccagcaattccattactgggtatatacccaaaggattataaatcattctactataaagacacatgcagacgtatgtttattgcagcactattcacaatagcaaagacttggaaacaacccaaatgcccatcaatgatagactggataaagaaaatgtggcacatatacaccatggaatactatgcagacataaaaaaggttgagttcgtgtcctttgcagggacatggatgaagctggaaactatcattctcagcaaactcacacaggaacagaaaagcaaataccacatgttctcactcataagtgggagttgaacaatgagaacacatggacacagggaggggaacatcacacactggggcctgtctgggggtggggggcaaggggagggatagcattaggagaaatacttaatgtagatgaagggttgatgggtgcagcaaaccaccatggcatgtgtatacctatgtaacaaacctgcacgttctgcacgtatatcccagaacttgaagtataataaaaaaagatgcatgtaaaataaaaccctttaaaaaggtaagaaaataggaactgagaaatgaagagggtaaaaagatgttcagcaacctgggcagaggacaactacagccatcaacataaaacctggctctgtgccctctggtagccaagggaaaaagggatctctgggctttggagtattcatttaggaataaaagttgcagccaatcagcagaagggcaagctttccctaccaatcatttctaggggaaaattattgaaggtgtcaggtttttcataagcatgagtacagaactgagcagggagaaagactttgggcccaatgtctgaatatcaacatgcacccccgtttcctgcatttccaagatgtccctgaatggtgtatccaaaagatggcaaatttccctcctcagtggggtcgtgggctagcagatgagccccttgggtttcccatcacctcccatcagggactgtgatgtctttgggggcagaggggtctttgcctccattcgccattttatttgggagatttttcaacatagcctgactgggaaggcccaggtattcggtttgagatcatattgccttattccgactgcctctccagcctttggagggaggagcccttttctgctgtccaactgcatgcctgcagcaagaagacaagagtccccagtgcactgtgagctgaagaaagtaaccaatatttattgggtacctcctatgggccatgccctttgctaagtgcattgtcaacatgatctcatcaagcctcctactaagtttaggaggggagtgttgttaccccatttcacagaagcagaaactcaggctcagagaagttgggtgacttactagtcagtgtgtggagcagagactctgcccatgttctttccctcaaacctggtcactgctggggcccccagggcctagtcctaagggttattgtccaagccccatgtagtggtcaggctggatctgggctctcctccaaggcagggcttttccagaaggattgcagggctcagacactggagctgcccctgccttgacctgctcagcatggatgtcaaaacccactctgaacctggtccctttgccctgctttcttctcctcccccaccctcatgccctcatgtggcatcgtgcctgcctcaggagctctccttgtcctatgtagatgaagcaggcatgattggcaggggtctgctctgccctgcctcagtccccacctcttctccaagctgtgccaaccctccgggtctgactgctgcccctctctcttaggaaacctctgccccagcccagggaacacaaggagcctctccaaggcagaggaccctaagcacttcttttttttattattttttattttattttaggttctgagatacatgtgcagagtgtgcaggtttgttacatagctatacatgtgccatggtgctttgctgcacctatcaacctgtcatctttttaagccccacatgtattaggtatttgtcctaatgctctccctcctcttgcctcccaccccccgacaggctcggtatgtgatgttcccctccctgtgtccacgtgttctcattgttcaactcccacttatagtgagcacatgtggtggttggttttctgttcctgcctaagcacttattataggccaggcactgtgcaggcacctcatcatctcagtcagtctgcaccgaactctgtgcagtagatattattatatcctcatttatcagattaggaaactgaggtgaagcaagttgtccaaggccacccagctgttaaatggcagaagtgggatttgcacctaggtgctcaagtgcattggtttgccaccatgtgctcaaagagaaggggcacaagagcctcatgaagaaggcatagctagcctgacagtccaaaggccagcagccgctgtggccatgactcacacacacctgcctcctcccagaactgccacgtgggtcctcacagctctgtccttatcaacacttactctcctttacaggtagcctaggccccagctcccagctctgttcgaggctcgcagaggggcggtagtgaaggggtctcatttctccaggatcctctttgctctctcgcccggtcctggtccagcttccctttcaagcatagtgaagtgcatttgttagcttgcagccaaccctgggaaatcatgagaatttgttcccaagtcaactcattctccagcgtccacagtgacgtattcactcacccagttgagcgcctagtgtatactagaccctgtgacagcaacaggagtgcaaaggtgactaagacgtggcccctgctttttttttttttttttttttttgagacggagtctcgccctgttgcccaggctggagtgcagtggtgcgatctcagctcctcacaagctctgcctcctaggttcaagcgattctcctgcttcagcctcccaagtagctgggactacaggtgtacaccaccatgccggctaattttttgtatttttagtagagacggggtttcactatgttggccagggtaatctcgaactcctgacctcatgatccgcccgcctcagcctcccaaagtgctgggattacaggcatgagccaccacccctggccggccccgcttttaagagaggggagagaagacctgggccttagaagagctcagaggaaccacaattgactctgcagtcaaggagaggaggctcactgcggatgtggtatttgagccttgaaggatgagtgtggtttcatcaagtagaaaaggcagggatgggaaagggaggtggtccaggcaggggtgatggtgtgggcaaagccttgctgatattaaagaacatagttctgtgcacctggaacactggatgcatggggtgcattatgaaagatgggactgaagaagtgaacttggcttagatcccatgtagtaggtctgagaagtaagatttaacccaaaggttgcaaaagaaccatgcttgtgataaaggatgatggattggggaaacagagaaaaagacagacagactgtaggaagggaggtattagcaaataatcataacacagtgtgaggtgtgcattaatattcactcattccaagtattgatcaagaagagaggtaggtactgggttaggaaacagcttgggcaaatgcatggggaaatgagagatgtcaagatgcattctaatggcagcctcttgaagatcttaagttgtttttggttcactcatttcgcaaatgaattcatttagcaaaagcactatggatacagtgcttacctctaggaagtaagttttagcccaaatgctgcagaaggatcatgcttatgacaaaggatgatggactggggagagagaaaaagaaaagacagacagactccaggaaggaaggtcagtctgcagctccttatagtggctaggagaaggagtctaggcagatacgactcaattagcttcatctgctgtttgtctctcaaaatctagacatgtgcactgctctggctggcccacctatcctgggcattgagttaagtgtgggggctgtgtgttgagagtccccctccattactggcaggaactccacacctcagacattgagccccaggtctgcagggagaagacgtgcttgcaaagtgagctaaaagcaaaacagcctctgacctggcaagcattcccaagtctgcacgcctgcagccagaggagagggtgatgccaggctgctgctcagatgcttttcagccatacccaggccaagacctggtgaccaggcagccagaaggagttccaggaggcacaaggcaggaagttgggggattaggaggtgtagaatggagaatgctctggggagatgggtgctttgttggtgcaactattcgtttattcctccagtgaccacgtgagcagtatggctgcacacacaggctctgcagccaagctgcctgggttcacatttggtctctgtgctttggaaaatttcataagctttctctaccagtttcccttattacccatgagattgatgtgaggattaacctagcatgtagtaaatatcctataaatattattattcaatagtgtacttctttgccaggaacaaaattcacctgttcctctttaaatgtcctccagtctgtctcctgggaaagattcttgtgagctccctggggacagggaccatattttgtttgtctcactgtatccgtagtgctttttgctaaacgaattcacttgctaaatgaatgaaccaggaacaacttaagaccttcaagaggctgccattataatgcatcttgacatctctctcctttccacatgcctttgtccgagctgtttcctaacccagtatttcactacccctcttctccatcaatatttggaatgagcaaataccgttagtgcatacctcacatggtattataattatttgctaatgcgtctgtctcctccatgactctgagctccttgagggattattccatgttgtaccccaggtgccccatgcagatgtgtattttgtgcactgttctgtgtaggctacaaaggaaaaggcctagcacctgcccttggggagctcacccacccaggatggacagaggtgtgcagacagagctgcagggtgggcacaaagggtccatctgctgaagtcctgcagatgcagccccgagcttgtccctcacgtcagcagcctggctcctggtctcagagagaactgtgtggttcccaagcattcactttaggaagaatcacttgcccctccctggctctctgcttcaaggaactgtgacaaccttgggatttgcaaactctctctttaatccttaagaggaaaatgttttggtaaaaagtcaagattagcagatacactcgggtgaaattctttccctggaaataaagaatagagccattaatatccacagtagagtgactttaaatgcccccggggggtcagcaggaaccagggccctgaggaaaggatcagcgtggggaagaggctcccacttccctgtgaggagctgcacatgcagtctcactggagctccctgctgcaatgctgttgcctgtggtggttggtgtggatgctgcctgccaagagccctgattccccaggaagagagaaaaaggcttctctcaggacggccctggtcgcatctgcctgtacaattcctggagcctttggggagctgaagtcaggggctcaagtgcccctgggtttcctggaggaggcaggtgtggtgagacagctgacagacaggagaagggatgctctgaggaagtgactgtccagccatgggaaccagatggcccctggctgtagtcctgatgctgccacttgctagctctgtgaccttgagcaggttacttcacctctctgagacagactcactgtctggacaatgagtaaaaccctacctttcctgtctcagagatttggcaatgggacccaatgacatcaattggaaaggatgctgtgggtgaaaggtaacctttcaggacagcgacaagcctgtctgggcaggatgaatgggctgtggagccctgtatatcctagctcactctttgaacctcagtttccacttcttccctttttatttattgccggggtcttaaatgagtgttgggggtatctgattctccctctgcctgtacttttggggccaagcactgagctgaaaagacaattcctcctagttctccaagcctacaacctgccccctaaccagctgtgagctgtaatacattctccagtgtcactgtgaggtttgtgccttcacccccattttatagatcaggaaacagaggctcctccaagtaaaggagcttgcctcagatttcacagccaatgagtggaaaagcctctgggattcaaatgtcagagcccatatttttcctacttctcgcacctgttatcatatgctgcctcttcctttaacctgcagttccctcccttcacctccaccgtctcaatccttcccactctttaaggttcagttcagctatgacttcttctatgaggctctactcattttctcagatttcttcctcctccaaatttcttgtaaaaattatgttttttctctgattctaaaagaatgcacattacattagaaaagatacacaagcatacagaagataaaaaccacctaatatcccatcacccagaagcttccagtttttctttatgcatttgcatatgcatttgtgtttacttttccccaaaagttctccgatactttgtcctacttttcttttgacccttataacttcctgacttcggtacctttctgatttgccctaccagagtgtgagcccctggaaggcagcctctgcaccctgattcaggttgccacacatatgccagctcctagtgggctggagggaaggacatgcggttggggaactggaagactcatgctttcagctgtgtgcttcctccctagagtgcaggcagaggaggaatcgaatcccctcagcactcttgtaaagaccacagcaatgagtgagagatggtgcctgccagacataccattctttacttttcagcttaaaacagatacaaagtttggggaggctcactggaggaggcttggggctacactggaaagagaagaacttggattcacaccccagcttcccctcttcccagctctgtcacatttgcaaactctgagtctcagtatcctcatgtgtaaaatggggatagggtttatagggttgtaaggatgagatgatgagttgtttgcaaacaacttctcacagtgcacagtgaaggtcagcaatgagagccagccccgccctttcttctttccaaatgattaatatatctgttaccagcctccattcattatatagctctgtcatgtgctaagcaccatgggggctgaaaaagatgttcttcctgccttaaaattccactggggatgaacaaattacacgggagctgatcagagaggaaggcagtccattatgagggctaattgagcagtgcagaccatgttgcaaactgagttagggcctggagagcttactgtgtgctggggtcctcaggaatgccacagatgcatcaataaccacctctgctactctggaagtagtcacatcaggaagactccagagataagcttatctgggctgtggccacagagctggaatttgtaagctttaggtttctatgtctcatgttaccagcttgtctataaattgtaaattacagccatctgatggttagggaatatgaagtttggttaagagaatgaaatgagaccacgaagattagagaacaggaaaagaggggactggggactacatacccatcagaatcttcattcagtcctgaccctcagcaggagggggatttcatcaggctcatttccatccttgatttcgtccatcctggttctcctgacaaggggcatttatcagagttatggcatgggaaatcacaggggagtaatgtaccatggcatttaagagtatgaacgttggagtcggagctattttctccgctacttactagctgtgtgactttgggcaagttacttagcctttctctgagcctcactttctttatctgtaaagtgagggcgatcagaataaacctccttcatatggttattttgagctttataaagagacaatactggctgagcacggtggctcactgccagtaatcccagcactttaggaggccaaagctggaggatcgcttgagcccaggagttggagaccagcctgggcaacatagggaatgagactcctgtctctacaaaaaatatacaaaaattagtcaggcatggtggtacgtgcctgtaatcccatctactcaggaggctaaggcaggaggatcgcttgagcccaggaggtggaggttgcagtgagccaagatcacgccattgtactccagcctgggcaacaggagtgaaaccctgtctgagagagagagagagagagaaaatactactatggtgcttataaaagttcaataaattttagctgttgttagtattattaaagtaagatctgtatgaaaataaagcagattttttcccccaaatgttcatgtcagaagtatatatttcattggcaaggggctgcttctggaaggttgagaggtatcctgggggaggggatagagcactggcaaaattggcatcacaattcaagtcacctcactcagtgttttttaagttatcaaaatccacagtatgaaaagcatttgacattacagtccactatatttatgcatttataaacaagagaaaaaatcacgaaaaatacagtaccacgtgcagtacacactgattccatctattctttttttttctttttcctcaaatgcacttgccgcctacttattccagacccaatgattgggtccctatccacagtttggaaaacactataagaaatgattgtgtcctctcactttccctctctgggatttagttttccaactataaaatgctcctgatgcccagccagcctcaccgctgctccgagtcaatgccaggaacgctgatttagcacatgctatttggagggtacccatccaggtgctgtgggagggacagagattgagaagagtgctttctgaccccacagaggccatttggaaaccctgggaatgggtgggagggttggaggtggggattgcttctcccctaagactcagcgtgatggaaaggcaatggggtgggaactaactggtgttggtctgtcccatttgtgtcccagcagccttcctgacagcgagataggagaggaccccaggtacagccttgggactgggtcagaagtgggtctcaacaaagggaaggggtagggtgggggtggaggacttgtgggtgggtaatgctgagtatggattcagggatgtgcagcctacatattttcagagacatggggctaaggcctgcattctcaatgagggcaaaatttggttcttggggacagaaaacacttagacattgcaatgctttgtggctgtccaaagtaccaaacagatgccagtatatctgtggtgctgaaatttcatggtgaatggagtcagaaaatagactagcgattgccagggtctggtgggagagagagggaagggactgccaatgtgtatgggatttgttttggggaagataaaaatgttttggaattagatagtggagatagttgcacaacctggtgaacgtacttttagtttcagaggttttctaaacctctgatttttttttaagtgacaggaaagacagaaaaaagtatatctaaaaaggctctaggggtgatcatggaaaagaaagttaagaaatatgactgtaaggaaaggagatgggtgtccctcaggccaggcagaaaattcagtcttgttgctttatgttcatgtgcaaatctaaaaaatccaagtgatatagattaatgaggctctgagtccctcaaaaccttccctccccttacctctccaaaaaacacttgagataccctagaggtggtatgaagtcaggatgggaaggttggctcagctttgcaaataagtttaagcctctggcctttgctctccaacaccaaagaggcttcactttggtatattttctctgccctttctccctccttgtccccaactgtcagtatgtgatgacaggctcagcctctgtaatggtagtgatcatatttcttgagccaaaaatcagacctcatggcatgtgacaagtttgcatatgtggatgagaacagagtggcagaatatttgacacgggagcagcttgggcagtccagggcacatggcactgcacctgacatccctggcagatcccccacattccgtggttgtcttctgatggggccatatggggctgcagatcatgcctggagccctcgcagctccagggctgcgggttcccagccccagagtgcaggtgctggtgtcagcctgcctggcctggcctggctctgtccagagcactccttgccccagctgtttgtgcagctgtatcagcctcagacctcagcctattcattccaacctgaatgcagaggctgggtctggaggagccacattgcgggcttcatactcctgatctgacaagttttccccccagagcctgcaccaatggcacctctccccattctccctcttaactgggtcctccagggccctcctcacacacccacgtggtcaggcagcagaggcttccccaagatgggcacaccccactctccacacctctctatgcagcatttgtggctacagactgggtccaggggattgtaaaggcatgctcatgttgggttggagggagctcaggatcttcctggaggatatggttcactcccatgagagctcagtatgcctttcctcccctgctgcagcccagagcgggagacagcgaccgacttggatatcaggtactgcgtcctgggaacattgccccccagggtcaactccctccagggtgctctcaggcccaagggagccacatcaccctgctgggcagcccccagaccccagccccagtgttgggggaggccagggagggcccctgtgctccaccaggtggctcgggagctgctgctgtttctgtgcatccatttactcccttcacataagatcatttttatctgggatctctttttcttttttcttcaaaaaccacatcactcaaaatgtggcttccttggctctgcttttaaaaaaaaaaaaaaaagttcttccatttggagaattacctgctgacttcaaagtccagtggcttgagggctacccaaagagggaggaagccagaagttgagtgttcccttggtttggtcacacttttgggctcctccctgactaaggaacaacagactgcagggctggggcaggctgggtgtagggcagggaggggatgaggtcctgctgccccagtcagttgagacccagacctctcaaacctgcctgggggaaggcaaggccaccagaggccacactaagcagatttctaccaactgcacctccccatccccttgcctccatctgagccatcagcttgacaactgcctctgagaacaagcccctgagaatgccttccgcaccccctactcccgccctgctttttccaggaagagaggccccgtggcctatgcttcgcagaaaccatggctgctaaatgccactgtggaggagaacatcatctttgagagtcccttcaacaaacaacggtaaaagcctgtcggagggaggcaggatgtggaggggaggaactgtctctggccagcctgccccagttccgggcccctccatcgatcacccacacccagccatctcactccccaggtgcttacctgcactccagcctctccatatggtgcacctggagaggggccaggtgtgcctgagcattggggcaatccagctcccataggggagagggcaggaatggagggaagggagagagccccgctgccttttctctagctggtgggagggctagctagctctctctgtgagtctccattcgcctggctcctgcactattttccctccaatgataatagttagggctagcatcgactgcgctcttactacataccaggcacagtgccgagctctttgtacacggaatttcctctcatgcttacaacaacctcagtaggtagatattattgttattcccactctacagatgaagaaccaagtttcagaaaggtcccaaggccacccagccagtaagtgaccaagatgggtctcaaatccaaagctgcctaacacctaagtacatgtttgtcaccaacatactctgatgcctccatgaactctggctggcacctgcccaggctaagggctggctggggaagtatgagaggaacaggctgggcaaatatttgaccagccatcatcattactgcctaaaccaaccagcagtggttttccctgcagtgccccaagcacgggttccggctgcagcttttcccactgcacagagatcatgagcgccctttcatcacttactctgcatatttgttcccaaccaattccatccttctagtatttaacctgcccaaacgctgtgtgaagtgctgacctcagctcttttcaagctcacacggtgtttgcttgcacccaagcgggaggcctattaaagccattgctcaccctgggcatagctacccagagactaatgaccctctgcaagtgctcgggccaactctgaccaggctgaccagctgcatcccctgcctctacccacgccaggtacaagatggtcattgaagcctgctctctgcagccagacatcgacatcctgccccatggagaccagacccagattggggaacgggttagtagcagcctctgaggggttttttcaaagccaggacccccaacctaccatgccctgagacactactcaggacaatgggtaactaggaaataggagacattgaaggctgaagagttgcctgcagtaaggtcaaacatgttgttcttgatgatgtcctttgacaggttttcagtcctgcttggagggcaaggtcagcttagtgccctcccaggctggggatcttcttcatttgcaccccaggtatacactgagagcccacacagcactgtgctcagcctggggttgtattgttcctgttcatcctccagatggggtcccctccacaagcttagacgaacaggattctcctgtgactgtcctccttttgtgtgattttaatccctgctgcctctgtctttgtttgtactggtcagatggtccctagcgcctacacaatgaatctttaaagacttggggctcatgctgccctcttctgaatgaattcagtaaacacgtgcaagttccttctctatgcaaggtgagaagcaggcaaagaagtggatagagccaggcctccatcccaaagagctcatagtccagtagggtacaggacagtgtctcctgaatggctgagggcatgatgtgttcctcctctttggtgacagggcatcaacctgtctggtggtcaacgccagcgaatcagtgtggcccgagccctctaccagcacgccaacgttgtcttcttggtgagtgcaagttcccttggggtcctggtctctggctgcctcccaggcctaactgcccacctccacctccccgcaaccccaccatcatccaacaatctccctctccaggagtaaatccctcctgccagagatattgccttatcatcctagtgatagggaaactgaggcaggcaaggatagcacaaatgacccattgcagacttcagatggagctctgcagtagccaatgaggagaggcaagctgtagttataggctgcctgtctgtgggacagcccaacccctcaacacttatgcagcccgactataagaatggctgataacagaatgtgtgctgccacttcccatcttatgcccagtgcagacattgctaattgttcacagcattatttcccatggaacttaactcatcctcagaatccttctcaacacagcactccaggtaaccactagccatcaaacatgagataaaactaggccaggcgcggtggctcacgcctgttattccagcactttgggaggccgaggcaggcggatcacgaggtcgggagatcgagaccatcctggccaacacggtgaaaccccgtctctactaaaaatacaaaaaattagctgggtgcggtggcgggcgcctgtagtcccagctactccggaggctgaggcaggagaatggcgtgaacccgggaggcggagcttgcagcgagccgagatcgcaccactgcactccagcctggggacaaaccgagactttgtctcaaaaaaaaaaaaaaaaaaaagaacgtattcgcaatccttacactacttcatgtcaagttctgttgtgtcaggtgccttgactgacactgaagaattctaagaaccagtccttggcctcaaagatttagaatctgattagggagacagagctcacccagttcaagaggcccagcccggttcaaatccaaactgtgcggcataaactatgagggggccttgtccagggagacaactgtgagggctggagtaatcagggagggcttcctggaggagagcctcaaagggagagtcaattaaacagaaggaaagagggaggccatttgcacagtgagttggaagaaggaagctcaagtctctgattccagctttattccctcccctctccctacaccacacgcacaagcactcctttactaaagacacttcacagtgggaagattcagtctccgttaccgtctgacacacacacagcgttttacaaagcatgggtgcattcgcgatctctcatgagatttaaacaaccctgctagagaaaagtgaagtggacattttatttcagtaaacgtttatgaagcgtctactctgtgccaggcactaaacgtttatgaagcgtctactctgtgccaggcacaggcacaagaagtctcagttcttgggagtgccataatcaggaatggacaaacaatgatcagatctggctttgcgccagtgtcacgggaatagggaggaaggaagggtaggcgtgggggtcaggacaggatgcaggaggaactggtgcttaggtgagcgaaggatgggtgggagttcacaaggcagacaaaaggcagagcagcactccaggcagaggaacagctcaggagaaggcccagacggcaggcttcctgggaacctggaatgcagagtgctgggaaagcacagatgaagcatgagtctagaagggaaagcgagaggttataaagcacctggaacaccagcccacagggtttgactttagagatgatggggagccgttgaaggtccaggagtcaggcagtgaagtgattagatctgtttgagagtgatatctgacaactgccccattttaaatgaggtaaccaaggcccagagaggttgggtgagttgtccaaagccacacagctaactagcttcagtccctagagcagagttgatagaactctaatgggttttatactcattgtcacccctccccaccatgcctttccctaccctctactctcttcctctcccttctgcccaggatgaccccttctcagctctggatatccatctgagtgaccacttaatgcaggccggcatccttgagctgctccgggacgacaagaggacagtggtcttagtgacccacaagctacagtacctgccccatgcagactgggtgagggggaacaagggggtcaggctatagggggcagggctggggaggctgtcaggcatcttggcaggaaccaatccgttgtcttggtagcaactgctgagggccacaaagcataagagaccagcactggatggctttatgcatgctgggcatttcagggagaccctgtacaggccaggggtttggtatcacctagacccacagacactccccatcctggcccgggccccccatggtacactcaaggctggcaccaagaagtctcaggaataatcaagtgctcacttctcaccttctgattcctgcccttttgatgacccatccccgcagtcatggggagtgcccatttggatggaaaagccctcttcccaccctatgaccttcccggggtggatggatgcaccaccccgggaatcatatgggaaatatggaaccaaacaatagcagtagtaatagaaacttcaggctgggcgcaggggctcacacctgtaatcccagcactttgggaggccaggacaagaggatcacttgagcccagaagtttaaggctgctgtgaaccatgatcatgccactgcactccactacagcctgggcgacagagccttgtctctgaaaatttgaaaaaggaaagaaagaaagaaagaaacttcaatattatcagtagagtccaatgttgtgaaacccctcattaactaaatttccatactcttcagtaggtagaaaataattactttttgattcattagaaagcacttaatttttaagatggagatcatgtaattttgaactctaggtcttgcctactcctatataaattctcctctaaacaacagccaaaattgaggccctctttgagcttcaggctggtgccaaatggctctgcttattttccccaaaataaatcttccttccatgtatgatgagaccccctccagtataaagaagacccaaagaaaatcacccaaagaaaaaaggcccaaagataagacccaaagacctaaagatttaaatatatatacagatacagaaggtttgtttctgagtttctgtagtgaccttggcaataccttgtagttcaggacaatcctgaggaacacagaagtgctggcttccttgaggaatcagtgatcaggactctcgagccccttgaaccccagcatagggcgggagggggtgagggcagcaggggtgggtgtctgaattaatgtcaggtctacgtgatggtgtcatcaagtgttccagataaaaagttttattgagccgggcgcggtggctaatgcctgtaatcccagcaccttgggaggccaaggcgggtggattgcttgagcccaggagttcgagaccagcttggggcaacatggtgaaaccctatctctataaaaaaaaaaaaaaaaattagccaggtatggtggcgtgcacctgtggtcccagctactcaggaggctgaggcaggaggatggcttgagccaggaagcagagattgcagtgagctgagatggtgccattgcaccccagcctaggcaacagagtgagaccctgtctcaaaaaaaaaaaaaaaaaaagatttattgattccaaagaggcatggccacacacacttagaccagcaggtgctttgctaagccctgatggaggctgccagacccgccgtcaagaggagctaagggtagtgtacaatgagcccacttagtgtatgacggccgctgccgtgggtggagtccttgtgagtaaccagccagcttgagcaggatgcactaatttgctctgcaaacccagccattgagaaatacgcctcagatgtaccgaactctaggtcctaggagtatgttggttggggtaggttatcaataccagcccacttgcagtggatgagctggtggccatttgtagtgaggaaagggatgtgtcaacctccatcttagactccacaattgagggatgtgaccaccattcctccccagccagcccccaaaccacgtttgttgctgcctttccagatcattgccatgaaggatggcaccatccagagggagggtaccctcaaggacttccagaggtctgaatgccagctctttgagcactggaagaccctcatgaaccgacaggaccaagagctggagaaggtgggtatatccagggatggccaagcagccacccctggatgcaaaggttctgctagaacctgaactcataaaggtcttcctgtccttagtgccccaggaagccccctaaagggcagatgtgggagctgggcatgaactggctcctaccagaggagagacagtacctgtgccaggtgcccagggcagaatcaggtgggcaccttcgccttatcctgaggtagtcagatactatttagttgcaaagtttcagaaaatcaactcaaactggcaaagaaaactaagcaaagaaaacaagagggaattaaggatttattgacccatgaaaccaaaaagtccaggtgtgtcatagctttaagtgtgctggatccaggtagtcagtgtaatcagaaatctgtttctcccatctcttgactctgctcccctcaaattggctcagctcccctcaaattggctccattctcatggtatcagtgagggccaccagcagtcttaggtttacattctcccagctcaacaactctgccagaaaaaaagtgcctctttccccatagttcagcaaaagtcccagggctgagtctcactggtccagtttggtcatgtgcccacccctgaacaaatcactgtggccagcggtgtggaatgtgaggattggcctgtcctgggtcacgtgccactttgggagccagatccacctgaatcacagagactaaaaacaggggaagagtggttccccacagggatatgggggtgctattatctgatgaaggggaaggactaaatcctggcaagatgaatgtgtgtctgtctgcccctccctcaggcagggacaaagtagaaatctgacattggtcatcaccagagtagttaccccttaacttccccttcccccaccaaccatatatcctgaagacattgcccaggccacatctgtcttttaggagactgtcacagagagaaaagccacagagccaccccagggcctatctcgtgccatgtcctcgagggatggccttctgcaggatgaggaagaggaggaaggtacaggcaatgggactgggagtgaaattatggcctgaggtctgatcagccacagagaggctaaggtttggggttctgggtgtggtgcagtagtgtgcctttgattaaatggcttccctctgtgtgcccccgttgtcccctcagtaagtggggataaaatgccctgattcaccctcagagggatggaaatgtgtagccacagagtgggttcttgcggcctgcagaggaggcagctgagagcgaggaggatgacaacctgtcgtccatgctgcaccagcgtgctgagatcccatggcgagcctgcgccaagtacctgtcctccgccggcatcctgctcctgtcgttgctggtcttctcacagctgctcaagcacatggtcctggtggccatcgactactggctggccaagtggaccgacagcgccctgaccctgacccctgcagccaggaactgctccctcagccaggtgtgactggcggcccatggcagaggttgggagtggggatgggggaagggctgagcccatgggcaccctggaactccaaatcactctctgcctgtgaaggagtgcaccctcgaccagactgtctatgccatggtgttcacggtgctctgcagcctgggcattgtgctgtgcctcgtcacgtctgtcactgtggagtggacagggctgaaggtggccaagagactgcaccgcagcctgctaaaccggatcatcctagcccccatgaggtacccgtctcccctggccaggctgggactgtgagcaagtcactgttctctgagccttagtcttcccatctataaaatggggatatacaacctgtcacaagcttgtgggggtgactcaaggagacagtgtgtgtaaaagtgccctccttgtgcaagaagcagggagaaactggcatttactcagccagatactgtgataggcattgtgtgtggttagctcatttaattgttaccatggccctttaaagtgagcgtctgcacatccaagtaaagattgttttctcctccctaagtgggtgtaatttgcccatccccacccatgagttcagctccctgccctcccctcactctctctccctcagccagcctcaggttttgacactgggggaacaggtagctgttctattaataatttcctgtaatgggatggataaaaatctcaaaggccacttgatgtcaaagaggtttaaagttgtccctgcccaattggttggccaacttggcttaaaaacacaacaggcaaacagattttctggccccttgtcgaggctagacctcacaatctaactgcactttttactttccagcctcatgagttttctgtggcccacagatatggcctccaagtttatttacttttactctctatttgccccagctctgtagttctgaaactccctggttggggttgggctgactctgggtcagccagccggcaggctgtccccagggccctgttcctcttggcaggttgtccctctggagaggactctgtgtcccaggaggacagctgctgagtcaggccgagccggcagctgagaaaggcggcagtcgtcagatgggcttgagaaactgaaaggctaacgaaaggccagcgcccctttgggcagctgcaggaattcacggggatacaggccagatgtctacaaattggcagaggatgccagacccatgaatgactccagagacacttacatgaaataattaactatctcattcagtaaacaggaagtaaatcaatggacaaatgagtaactcttcctctggctgcctcttaggttttttgagaccacgccccttgggagcatcctgaacagattttcatctgactgtaacaccatcgaccaggtacagaggaccgtgccacactatccccccttccagagacacctcggacccctgggggcttctcctgtctgaggctgggttccccagatcaggtgatcacagccctctgggaagaagccagtgtccccgatccgattataatgctgcttcagggctggggcctccctcgtgggagcctcacagtaaggctgagggaaaccagatccctttagcttccacctgagatcccactggctttctctagtaaagttccagcatattctgaaccaaggtggctgattgtatggagaatattcattttgattcagcctgtgttctttatttaccattgtaccagatggtgtgaaaacaaaatcttgattcctacctcagggagtttaccttgtagctggagagatgagatacgtgcctataataaagggagagcaaggccgggctcagtggctcactcctgtaaccccagcactttgggaggcggaggcaggcggatcacttgaggccaggtgttcaagaccagcctgatggccaacatgatgaaaccccttctctattaaaaatacaaaaattagccaggtgtggtggcaggtgcctgtaatcccaactacttgggaagctgaggcaggagaatcatttgaacccaaggggcagaggctgccgtgaaccgagattacgctgctgcactcaagtctgggcaacagtgagactcagtctcaaaaaaataaaggatcaaaaaataaagtgagagcaaaacatggcggccagtagcactctaaacacagtcaataccaaaattcacctcactctctccccctcgtctccctcagcacatcccatccacgctggagtgcctgagccgctccaccctgctctgtgtctcagccctggccgtcatctcctatgtcacacctgtgttcctcgtggccctcttgcccctggccatcgtgtgctacttcatccagaagtacttccgggtggcgtccaggtgatggcctcaggggtgaggggtgggaggtgctttgcaatgtgcagtttggtgtacttgctagactcatcgttatgagagtaatagggtcgtgttccctccaaaaaataaaaacaaaaaacagaaatgaaggaaatagaaatatccacatcttattccaccgccctaatataatagtctgccaacacacgcacacactgaggttgacatctgaattatttccttgggcgatatggtcaggactggaattgctaggtcatgataaatgcacattttatgcccttcattcattttgccaacatgcttcccaggagggttgcatcattctagtggtcaggctgattgctgatgcatgaaatcggcgggcacctgattcaagcagtgttatgataacacctcccagcccacgtgagtccagagtgtagctgtaagccttgacttgagggagcctctcacagccattctcatggatcacatttgccctcatgagctttggatccatgcacgcctctttcctcctcaaaattttctaagaatgttctctagggagttctttctgggagtgattctcccagattcatagaaactcatagattcaaaaaattgtaggaaaaaatttaaagaacgtctaggccagtgtttctcaaactgccaattacagcccatcagtgggtcatgaaatcaatatcatggatcacaaccagcatttttttaaaaatgaaaaaaacatcagactgtattcatagagtaaagcaagctttgcttcatgaaacctttgtgttggtcatggaggtgtgtgagtactgatttgtgagataaaatatatttctgactgcaggttgtggtcagaaaggttaagtacctttcccaagtgcacatagttggctagaaactagagttgagatacttattagcaataataaaatttagatgcattttggacacaattacctgccccaaaggatcaacatttgtataaatggctttttgcttggatgatccagaatggcccgacacccacacgaacaacatagctttttgacactcaaaaaattcaaagtgctgcacaagctgttctacaaagttcatttcttctgccagagaaacagcccagtctctgtggcacccagtctgaccctggagatggtttatcagggaaatcaacttcctgcatcccaaactggcctccctggcactgatgtgcttgtcgaggtgcagctttggggagcaggaggcaattctgttgccatggaaacctctggccttaccccgagacgaaacctatcatttcagcacatcactggccagggtctaaagagctccttgatggggtaagcggaagacggggttgaacgctttgagtttggtcttctgttcctttggccagctgtctcaaggttcagattgttcacctgtaaaatggaactagcactgcctgcccagccttagctcagctccaggctgtgcagcagaagtacagggacagatggcgacctggggttgacaatgcccaggacagcagtaattgtgccccacatcaggctgtgtctaagcattgtacataaacgatctcattcagtgctcacaaaagctcaatgggctggtggcattgtcttcccccttcacggggtaagaagctgaggcctagagaggtaaggccattcacccacacagcggtagcaggtggagctaggcttcaggcccaggccgagccctgagcctgccctcttaactgttccactctgttccccgccacagggacctgcagcagctggatgacaccacccagcttccacttctctcacactttgccgaaaccgtagaaggactcaccaccatccgggccttcaggtacgagtccacattcccccaaggtaggagtggaacaggggtggggccagggggcacaggccatgagatttgattctcaggactccacttgggaaggccaaggacacgttctctctcaagctgcctcaggtcccaaggcccaagggatatccaccagcagggacaggccaggtgggctcccactgaatgttctagagaggaaaattccagctctgtagacaagcccaggacctctgtgaggcagagcatgaaaagagacaaagctgggacaagtcttcatgtatcaacgctagaaagggccttaggtgcgggccaccctaagcccttcttttattaaggagcccctgtgtgccaaacactatgctgagtactgtacaggccaatcccactcattctgcactgcaaccctcggtgctgagaatggtcatttccattgcacagacaaggaaactgaggcacagagacgttctataacctctctgtgtaaggtgccacaaagcccagacttgaacctatttgttcatgcaacaaacatttactaagccccgactatgtgctaagccccatgccaggcactaaaaagatgagtcaaataagccgctgccctgcaggcgtttacagcccagactttgagcaggccaggataaatccacgtgacaagtattctgaaaaaagcggattcaagggctgtgggagcatagaagagagacagtccgggaaggtttttgtaccagaggtgtcatcagaactaggactcaaaggaggggcaggagttcaccaggctgaggaattcctgaaaacttcagtgcccctgccatcgtctcactaccctgagtggtgatgttggggtggacaggagcatctgaggttgcctggggaatgagggaagctgttgtttcccactccccaagagtctgtctgatctccagaggcatctctcttccagtcaggcaggccagagacccctgacacacaaagttgggctcttttctcatcttcatccagagagtgataataggttatttttagggtggcacagctgcacgaagtatgacagtaaccatgagacaccaagcactgtgtccaggagtaaccatagggcacaaggaccagccaagggccagagaggcttacatctcctccccccaacccctgaagtccagcttcagccctggagaggtatccaggcccctctgcccaccctggagcacctagggccagtggaaatccacctcttagggatcttgtctaagtaaagaagagcagagcaaagctctgccctggccttggcgctgctccctggacatcccttgcccctggacaagcctatgctgtgtcttccacaaagaagcttgctggggactggattatgactctagagtctcctcccagcctcctcttctcaagcctgaacttctcccgttccttcaacttccaggtccctcgacattactgagcctagcctttgctctaagttttggtgatttccctctctcaattggtgtctcagagggccctggggtagagagatggtgactcttctagagtgggccacagccccttgtgtgcagatcccagcttcctgtaaacagcctcagatcaggccaaacctgtggtcagccagagccactgctacccagtgaggtcttccacaccctactgacacggtgaatgatttttaaatttgaatgaaaggctttttaatcaaccccatacacatttaatgcattggctttaatccagcagcctgttgagagctattagcacttattgattgcccacttactgtatgccaggcaccgtgctaagtgttgtatgtgcattattacatttaatcctcacaaggaccacataacataggtacgaatcgccacattctccagatgcagaagcgagacccagagaggctgggtaatcaatccaaggtcacacagactgcgggggctggcgctgagcttggaacccaggtttgcctgaccttctgggctttcctaagagatcttattttttcccaaaagagtttcaagagtgcccagcactgggctcagtggcgggctcggaggttgttttcgttcatgtaggaactatcacttccccatttttttcataagaaaactgagtctcagtcctgatacacagccaggaagttgtgatgttcaggctccaacctgggtttacatggctccgaggctggggctcttttctagtcctcagacacactgtcgcacgcctgtggcagaagctcccatctcacacttgccgaccctcaactcacacagtcctgagacccacatacgctgagcgcctcacactcctataacacgcacatgccctgatgcacacacattttcaacacgcacttactctacccttcaggcatggtttcacactcactgcagacacgtcaccctcccacacgtctccaccctgggggtgtgcagtagcatgctctctcccacctcagaacctcccttcagtcccctcagacacatgccctctctccacgcagagacaatcaaagctgaactaacaccttccagggtgaaaagcaaatgcccagtaaggtacgtcttgggtgcctccgtgtcccctgagtttggtcctatcaaaccagcgatgatgaggcagcttttctttcgttccttcctccatcatcaaacaagtgctcctgcatctcctctgggccgggcctacgtcagcaaggtctgagggaagcggccaaggagagtgatgacggcagcccaggttgatcagagaaaggaggcaggtccatgcgcagtaactcagggaaaacatgatgaggacctaaggatgagaaagaagcctccagagttccctgtgcagagagattccatcaatttcagagggtcaggggagtgccatgcattcatccaacaaatatttattgatagtgccaggtgctggggtatattggtgaataaaacatcttcatggaatttgcagtctattgagggagatgattataaatagctagagaaatgcatgtacagcagatactgtggagcaaacaggttgcagacaataataggggaaacctactttatagtaaggtagtagccaggaagagcctctctgaggaggcagcatttaaggcaagccctgaaggttgagttgagccagccttatgaagagcaagggcaaaagccttccaggaaaagggaatagtgtgtgcaaaggccctggggtagggaagactttagtattgtcacagagcttttaaaaagctgagtggctgcagcatagtgtgtggggtgtttgtggcaggaattaggttggcaggagggggttcttcatcctataagcagtggaaggtcattaatattcttttttatttgtttttttttttttttttttttttttttttgaggcagagtctcactttgtcacccaggctggagtgcagtgaggtgatcttggctcactgcaacctccacctcccgggttcaagcaattatcctggcttcctcagcctcccaagtagctgggattacaggtgtgcaccaccatgcccagctactaatttttgtattattagtagagacagaattccaccatgttggccaggctggtcttgaactcttgacctcaggtgatccgcccgcctcagcctcccaaagtgctgggattacaggggtgagtcaccgcatccggccggagatcattaatattctaaacagtgggggagaggacacagtttgcgatttagatagattaagccagccactgtgtggagcatggactgtagggagacagcaggtagacgtattcaggaagctgatgcagtagtccaggtgagagtttgtggtgggcaggaagcaggatagagggggagggaggcaaggactcttttagagagagacataagaggacttgccaaggggctgaatgtgaatccaggtgattcctgggtgagaaactgggtaaagggaggtgccccttattataatgggaaagacctagagaaaatggatcttggggtgaaaacaagagtttggaggaggtggggattctggacaggtttgaataagcagaaaggagtggggtggacattccagagagggatagcttacatgaagtggccacggtggcatgtctggggactggaggggccctggagcctccctctgcaggtagggagactcctaggagctatgtggaccaacactgttcccttaggagcttctcatcctccctccaggtatgaggcccggttccagcagaagcttctcgaatacacagactccaacaacattgcttccctcttcctcacagctgccaacagatggctggaagtccgaatggcaagtgctattcccctctaccctggcctctgataggagggtggggccagagcaagagcacacaggtacctggggatgaaagagaggataggataccagatcgtgtggacaccaagccttcctgcttcccccagccctggtggtcctcctagtgtctagcctgtgctccttttccccatatcactgcctggaggcttgtgtatctgaggtgtgtgccagtggcaagaacagttgtggtgaatgtgtatctgcagtgggtcatatgacacccacattgtgtgtgtttgtgggccagctgaggcgtgcatgttaaagggtgtgcaggggctagggggtaggggagcatgagcttgtgggacatgttggctcctggggctccagccttcgcagcccttgtgtgtgtctggtgacgtgtgcatgagttgcagggctggagtggaggcctggctgagctgctctctgccccgaaaaggagtgaggtagaacaggggcctgtggctctaacccctgagcgcccaggtcagctcctctccctccccaggagtacatcggtgcatgtgtggtgctcatcgcagcggtgacctccatctccaactccctgcacagggagctctctgctggcctggtgggcctgggccttacctacgccctaatggtgagcggcagtgggctagggcagaggaggggtcagacaccagcactcccggagcaccttcgtcactggagacatgagacactcccaggccttaccccaatttcatttgcatctgatgccagagggacagtgcgggcaggaaggctgaccagcaggccccagggcccaggccccagacaggtggaggttggggagccacatgactgaccctccctgtgcctccagggagggctgctctgagcaggcagtggatggcagcaaaaggaatctggggccctggcccctctccagccttaagaagagccattctggtggctgaggacagaactaagcgaccatggagtgtgcgccactggcttgctccccacaggtctccaactacctcaactggatggtgaggaacctggcagacatggagctccagctgggggctgtgaagcgcatccatgggctcctgaaaaccgaggcagagagctacgaggggctcctgggtgagaggctcagggagaggggtggggaagagtccaaggaggagtgtgtctgggttgggggccacaagggagcctggggatggggtggcactttcggatactagctgtggcccatgcctggtggctgagcccagcccggcccccagcaccatcgctgatcccaaagaactggccagaccaagggaagatccagatccagaacctgagcgtgcgctacgacagctccctgaagccggtgctgaagcacgtcaatgccctcatcgcccctggacagaaggtcagagcacgggcccaacccaatgctgcaggacaggcgtgagcaggggatggggcatgcacggagctggatggcttcgcagtcacctcgtggccctccagggccgaggcctctcactattcagacatcgcagtctcctgccctgggcctgtgggggcccatctttcctctccttctattgccttcccccagtgctgccctcaggccttgtcttctcactcatccaccaaggagaccgacactctggactcccccagctcacacgggctttgtcagggcctccctctctgcgaatggtcaggggctttccctagggcactgccccgagcttcagggcagggacctgggggcagacagcgaggccacccttgtattgagggtgagcccctgcctatggccctggcccagctctcctctcgtttcccactctgtctctttgtctctgtctcactttgctgtggctgtccatgtcattctctgaccttgggatgtacctctgtccctgcctctctcatccttctatgtcactatctgtctccgtattgtaatttctgttggtacccaagtgccaggaagcaacgggatcagaggtggctccattgtagggcggggcacacagacacatccatgcataccactctcagctgcccctgtgtcctcctgccacacccatgcccatagagacacaccactgccccccagctctccttcagccaagtacccggcacacccagacccacaccaaggcccaggcaaatggacatccatgcctgcacttgcgtgccggtccctgtgtaagccctctctggacccactgcaggaaacaagcccaaacctgtggtgtccaaagagaaactagtcagaaaaccaggccaaaaagataccctgtgacctcccacacctgcacacacacccagagctagcatagaggctattcccagcagccccagagtcccagtggcggtgcctgcttctctctttccagatcgggatctgcggccgcaccggcagtgggaagtcctccttctctcttgccttcttccgcatggtggacacgttcgaaggtgagttgtaaggcgggcaccccacgtgtacccacagccaccagatgaggcctcagccctggcacgtggtcagacatgacaggaggcccagcagtcaccgccttcccctgcaccctcactgggacccatgcagggcacatcatcattgatggcattgacatcgccaaactgccgctgcacaccctgcgctcacgcctctccatcatcctgcaggaccccgtcctcttcagcggcaccatccggtgagccccaccacccctcaggcccacccagccccaggccggctcagttccatcagatctggagcacaaagaggagggggttgggggagaccaggatcccagaggtgtttcctgctcatgcccttctccatcccatcaggcccaggcagcctctggaaggggatcccccacccatgggtctaagatgctgtcccccacccactgccaccacctcggtgcttctcccagccagacctccaactcagtctgctctcgctcactgccctctttgccgcctggggatgcaggcaggaccctgctccctccctactggggctttctgtgccacttccagatttaacctggaccctgagaggaagtgctcagatagcacactgtgggaggccctggaaatcgcccagctgaagctggtggtgaaggcactgccaggaggcctcggtaactactcctggctatgcagctgggttggttgggcactcaaggaccctgtaaggatggcagacagaagcccgtgtctcaggtttgccccaagtttggagtctgaagcctggcaggaccatttagtcctacttctcactatacgggggcccagagaggtcaggtgtcttgccccaggtcacacaactggtcagttcagggtctggctcctcctgcagggtacagcgggtacagtcagggatccttgtgagacagagattgcgagtcccccatgccaagggggcatcttcagccctgccctgccccatccacctgcatgcccagttctgccttaggggaggagaagatggactgggcaatcatagacacgggtcactcatcaaggccaccggtgattggcaaagccttggtatatttgctgcagctcctggagcattgggggtggccaagccttggtttcaatgaatcaccctaccaaggccctacatacacactcagtgcacccctcagtgcacacgccccctcccagaactgcccagggccacagcagcacacacctccaggggtgcccttctcgttgcagtccttgcagacggcctccacattgttgtgtcaggtgcaccagccctgcacacgcctgtgctcttggacacacacccacctatttgcccccatgcacacattttccaacagccccccaagccatcccatctgctccactcacagcacaagattaactcagtcctacttcatctccccgggctgttttcagatgccatcatcacagaaggcggggagaatttcagccagggacagaggcagctgttctgcctggcccgggccttcgtgaggaagaccagcatcttcatcatggacgaggccacggcttccattgacatggccacggttggtcctgggcccctccatgggaccatggtcttggaaagggtttagtgggatgctagggagaaatttgcacgaagtagtcctgaggctcaagttgcctctaacatcaaatgctatgtgttgcagaaaatgaaaagagctggggggaccctgactctgtctagtcttagggaatgttacacacacacacgcacacacaaaaacactatgcaaacacacacataagctgcacacacagacccacacagacttcacactgtcacctatcacaacagcacacacacagccacaaccacaacctacatacacacacagagctgagctcccaacaggctgagtccagtccctgagtgccgggaacctgttcagtcctgtggggtgggggtgggactaggatcggggtcagatgggagctgagccacagacctgggctccacatcccccaagccaggccagaccccatccactgggcaggtgagccaacagctgttgcccccacttggcaggaaaacatcctccaaaaggtggtgatgacagccttcgcagaccgcactgtggtcaccatcgcggtaaggggcccattgatggggtgcagagggacacccagggacaggactggcctgttgtggccgtcatcagtgcacagcccctgggcttgcctggtcccagtaatcaagaaagaaccctgaagcaggcagttcagggcaaggggcctggagggcatgcagggagcctgggttgcaggatttggggtggggggttttgcccctgtgcttccctcagacctcccctctccttctccaggttccaaggcctgcccctgtcccaaggccttatatgttaggctggcgttacttctccataggaagtgggggaggggttgtggagggtctctgagccttgaagcctggaggtggggtagagttgggacttggagaggagagaagggtggtattagcagatggagagcttgtagtcacatccaccccaggaaagtgcagtccccacagtgacaggacattctggccacatgcctcatcctcctcctccaagccgcaggagggccaccctcagctgtggcccccaccgcgggtggtattcccaccatcctgacccgccccctcctgccctgcccagcatcgagtgcacaccatcctgagtgcagacctggtgatcgtcctgaagcggggtgccatccttgagttcgataagccagagaagctgctcagccggaaggacagcgtcttcgcctccttcgtccgtgcagacaagtgacctgccagagcccaagtgccatcccacattcggaccctgcccatacccctgcct

SEQ ID NO: 15329 - DNA, 83933 bp, Homo sapiens
agaggcgcggcaggcgcgcggagccagcggagccagctgagcccgagcccagcccgcgcccgcgccgccatgcccctggccttctgcggcagcgagaaccactcggccgcctaccgggtggaccagggggtcctcaacaacggctgctttgtggacgcgctcaacgtggtgccgcacgtcttcctactcttcatcaccttccccatcctcttcattggtgagtgcgcgcagcgagccgcggaggaggggacgggagagcagggagggaggaggaggcgctgcgcgccgcaccgctcggcgtccccttccggcccgcgaccgccgtccgcctcgttcccggggtcccctgccctgtgtcctgcccgccggtccccgcactcgcacaccagctcatcccttcactcccccggtgcccccgatcccgcgccaaacacagcggacgtttgtgacccatgggatcaccaagttttgcttctgcagggccaagagctgggatggggaaaagggaaagaggaggtctcagcacgcagtgggaaactggagaggggtcgggcctcaccctccgtggcgcagcttagggagccgggtcacccctcccgcaaggcagcctccctgtcagccgcagctgggcctagggaagagggaagcctgtgctttggagtctgggatggaggcccagctaacccctatgctttcaccgggctgagccgcgcagtggtccgtgatctctgacagtcccaggcccgcgccctgggcgaggagaggcgagagctagggacttggattcccttcccccgccaccccacccgggcatgtgtctccagagcgcaacttctcaggctctgcgcaaagtagctccgactcgccgacgcagcgaccccggcgcccttgcttgcaaagttgggcgccacggccgggacaatcgtgcgtgcctctccactgaggtcccccccatctctctccaagaccttgactcttccagaccagtcaagtctatcaactcatagggtgtcccctgcatccccaaaacgtgttcattcactttaagaaaacaagcaaatcttaaaattcatatacagctttggggaagaaaggaaagattgtcacaaaattagatttacaagaggttgctgcagaagcagagttgctagttattaacaaagacagttagatagaaatagaaataaaacatacaaaatatgtgctcatatgtgcatcaaaaatcaaaaaagaacagcatttacacttctgttctcagccaaacggtttattaacctgatgacttgtcacacaagaagttagtatgtataatggggtaccttggcagggcacagtggcttacatctgtaatctcagcattttggtgggctgtgacaggaagactgcttgagtccaggagttcgagaccagcctgggcaacatagtgagaccccccccgccctttctacaaaaaattaaaaattagctgagcatggtgatgtgcgcctgtagtcccagctactcaggaggctgaggcgggaggatcacttgagcctaggagatcaaggctgtagtgagccgtgatcgtggcactgcactccagcagaggcaacagagcaagaccctgtctcagtaaaaaggtgtggtgggggaggtaccagcataggaccaggctgaatgagttggacgtttagtttgtgtgtaccagccttggggatcctcatgtgtaggtgtcaccctcaccatggacccaatgcccaagcacctttctggggttcatgcaccctcttcctcctccaagtgggcaggcatcctgcctctgactgtctctccctgcaggatggggaagtcagagctccaaggtgcacatccaccacagcacatggcttcatttccctgggcacaacctgcggtggatcctgaccttcatgctgctcttcgtcctggtgtgtgagattgcagagggcatcctgtctgatgggtgagtgactgtctgaggactcaggaaagtgaatctgctccagggtacttcctgaaaggcccaaggagatcctagctcacctatattccacaagcccatgtcttttgttactacatccagcagctcagtgtcttctatgtgccaacctctctgagctgggcactggacgcaagtgagtcccaggccctgccatcagtccaggagagcagagggaacacggacctgcatgccaagtcccagtgaaataatgctagagcctattagaatgccacaactccagtgaaaaatgtctggcctcttctacaacctgccggagttaccttcttggaaaaaaaaaaaaatctaaccatgccacccactcttgcataagacctttccttggttctcagctgttttgaagatgtggtctcagatcctcagcccaccattcaaggtcttcacagtcagccccacctatctctggcctcattccccatgcccaccttccgtttgggcctcacagcacactcctcacacctctgctacagcacagatcacactgtatgttaaagtttatgtctatttgcaaaactgtcttcagagtcagaaaggcctaagagttagaatctgagtcttgttcatctttgtgttcacagtgcaaggcatgtgataaacataaacattattcagtccataaacatttattgggtccttaggagaatgaatgaaaccatgttacaaataagtactctgggaggtgagaggaaggcagaattgggcaagctccatggttgagagggctttggagcggagtctggaagggtgactaggcttcagacacacagaggaggaaggagagagagaactggtggtgcctgagggaagggaaaaggcaccaaagagaaaagcaggtagggctagggagcagcgcaggggctggagcattaaacacaggctggggagcgatggaggctgaggctgggaacccaggttggggcatctcaggaggactgtgaatcccagcctgcatgtttgggtcggatttggtcagcagtttggaacagaagagagatgtcatcagcataacacttttaggtgggaacctgaggtgttcagcgcaggctggaggcagggagaatctagaggtataatagaagcaggacttagcattgactgcagtagtctaggtgagcaataactgcagacagaaatggtgtgtcagcagtcagggacagaagaggagcgggagcagccatctcactaaggaagaatccagtaaccagcaaggatgagagactgccaggagagggagtggtggaggagagggatatttggcttgagtatctgaggtccagcgccccctgagctggaatcagattatacccagactgcactcctgcagtgctgcctggctcctgtagttggatggcaggggataggctccctcatcctccctcccgttccccaccttcccttccccaatgtccctgcatcctggcttcagcagtgatctctaaaatacctgcttgacttggaggcagcagctctgcctgcttattaaagtccctagaccagcaagaagaccagaaggcatactgctacacaagcacgtgacaagtccgcctccacccccacccctacaccccttccaaagtagcacaaatgccacagtgagccctcagatgggaaatactcaccagatggtgacagagaaagacacctccgcccttggagaaggaagacctgggtcttcagtgagcactgctgctgtgtaccagctatgggactttgcacaagtcattcaggctttctgggcctcataagcatttataaacatacgataaaacattttagttgccaacttaaaaatgtgtgagaaagtataaggtgtttcaaaattatttcaaggagtaaagaggcaagagttttgaagatccctgggcagggtgttggctgttcccagtgtggccattcatgactgctctctggccttatgaaacaagcatcatagtccctggcttgcctgcttcatggggctgtggagggtgaaattcgagcatggacagggtgcagagcccggagtggcagagcactgggtagactgtgtattcccagaatgtgggaaactggaatgaatcggtccagggatgccctcctgctggctgtcagcagcccctcctgtgtgtggctgtactgcttcagctcagtgcaaagggccatctcctccccagggcacagatcagctcaagctgagtaattgtcatctggtctttgtgagctcctacccccaggcctgagtgaggggcaggaaaagagcagacaggagaagtcacagacccttgtgatacctccagtctaatccagcctgggttttcagagctgtctggaaatttagggggcaggtgggagggggctgattaaggcagccctgatttgatttagagtgagcctcatttagtgactaattaagccatcttaaacctgtagggcttcccctcttcctttgggtattatttctttctgtgatgttctgaattcagaacaatcaaaacagtataagttagtgaagaagatattttttaataactacaatattttcccagaccaccatacactggataaagcctgtatataaaactttacctaatttcttaactaattgaatgtgtattatttaacaaagcagctaaaaactattctatgaagccatgtcatgaaatatttagttcaattatggttaatcctcatcttatttcgtcttataaaattttaacatttctacctcctattgcaaaaaaaagcatttatatcagcatataataaaacatgtctagatgtcagcttaaaaatgtgtgagagagtagagggtgtttcaaaattatttcaaggagtaaagaggcaagagttttgaagatccccaggaagggtgttggctgtgcccagtgttgccattcatgactgctctctggccttgtctgtcttgtaccttctatattagtttgaagaccttttttggagaatattcactaaagaatatcaatatctaccatttcattaaaaaagaaatgtggagtttgccttttcaagttggtttgatgcttattgatgttttcagggacccagcctcttcccatctttccataccatcctgtgtgtgtgtgtcagcctatcttccccatggtcacaaggtggctgcctagctccgggtattgcttagcatgagcagagagggcatgctgccgacatgcctctcctttatgacagagatcattctttctttgacatctcactggccagaatacgtggaccaacactggcaaaggagtatggaattgcatggctgcttaaaccaatcaccatccattccctggggctgggtatattgctgctggagcaaacctgtggtcctcctggcacagaataaggggaagatactctttggtggacagcccacattgcctctacacttgcacctcagtcccaccagacccactgaggtcacaggatagctctcctcatgtccttcctccttctctgttgaactcttatgtatccttcaaagtccagcctggtgccacctcctctgggaagctgtccttggttgcccaccccctcctttgtgctctctcagtctctgtccatcggcagtatcacttccctagcctgctgactccaacagttagctctgagcatggcagccccctccataccatcagcttctcaagggcagggacccttggcacactggatagaagtagcctggtgggcaacagcagcactgaggcagcaagctgtagcaggccatctgggaatggagtgggtaccacagggctggagcagaaagggcaggctgggcagatctgataaagtggctggaggccacatagcctgggcctttcgttccaggctgagcagagtgggttttgctgtctgcaggagggagctgtggaagggcatgatcacgaccaactaaggtgaccctcctcaccaggcccagggaagactgaggcctggaaggaggctctggctgcctctgggtcttacccccaggccacagtccacccacttagaggcctctgtgagttaaggtggagagactatgagctggtattgactgctccattccccatcccgagagaggagacaaaatcagtgaccttggaaatgcctcttcgtgcctcagtttcctcaccccataaaatgggagactaagagtacccactcgatggggtttaatgaagattaaatgggttaacatatatcgcatgcttagaacagtgcctggcacagagtaaatgctccataaatactgactctcatcagtttgttatcacagcctctggggagggcgccagtgctgacttatgctgttcgtgttaaatggggctgtcactgggtgagttgtggcatacaggcccctgcactgttcaagagaccccagcaacccttgtgcttagggctcagcacatagtaaggcctccagatcatatacccagctctactccatgtactggcagctctgcccagcccataccccaaatacgcccattaactaaagggccctgcagcctataaagtgatgctataaaggttcagtgttcagcctttgaaattcaaggcctgggctgctctattgcagtacttagcatgtccccatcctgtctgtttctctctcccatctcagggtgaccgaatcccaccatctgcacctgtacatgccagccgggatggcgttcatggctgctgtcacctccgtggtctactatcacaacatcgagacttccaacttccccaagctgctaattggtaggtgaggtgtaggagggaggggcagtaccttcattcatttcttcagataatgtttactgaggactcattatgtgccagctattgctctaaacagtagagatttggaatagaaaaagaaaaaaatccctgccttcatggagcttacagtctggtgaaggaggatagacaggcaaagacagtgaataaacaagcaaacaaataggtggtggggatgctatgaagaaaatcaagctgagtaaggggtaggggcaatgacaatgttgctatctacacaggatggtcagggaagggctgtggtaactgtgggcatgcagatatttgggggaaggtattccctgcaaggggagtgacaagtgcaaagtcctctgatagggatagatttggcaaagatgtcactgtgggcaaagccaaatgagcaaggggaagagtgggaggtgagggcaggcgtcaggagaggagcgagcaagagtcccaggctctgggcctgagagcctgggtgaactgtggcatcaataactgatgtgacagaggagggggaggtgggctgtggtggggataaagttttctactgggggcatatcgagtttgagatgtcacagagacagccaactcaagtgtcaagttgggctttcatggggaggtcaggacaggagctacactttcaggaggtgggccttgtagatgacatctaaagcttgagcctggggctggctgccgtggctcacacctgtaaccccagcactttgggaggccgaggtgggcggatcacccgaggtcaggagtttgagaccagcctgaccaacatggagaaacccccacctctactaaaaatagaaaaattagctgggcatggtggcacgcatcggtggtcccaggtactcaggaggctgaggcagtcaaatctcttgaacccaggaggtggagattgtagtgagctgagatcgcgccactgcagtccagcctgggtgacagagcaagactccatctagaaggaaggaaggaaggaaggaaggagggagggagggaagggagggagggaggagggagggagaagaaagcttgagcctggatgaggtcacctggggagagaagagaaaggctctgggaccagagcttgaggtttgctaacatttagagagactcgggaaggactgcccacttagagcttctgagatgttaaatactgcaggactggggtcccaggcagaagcaacaggatgatggttggtgtttactgagcatgtgccatggggcaggctccatgccatgttccttacattcattgtcccacaggctaattcccccagcctccttattggtattgttaatatccccattttccagtgtggaccctgaaactgagaggttaaaaataataacagtaaatactcactttgtacttactgtatgccaggccccatcctacctatgtgatatattaattcatttaatccttgcaacaactctatgaggtaggtaccattattattttccctttacatatcagaaaactgaggctcagaggttaaataactggcactagtctagctcgtcaaggggcacagccgggagtctagcatctgtgcaatctcctaatcatttctgagactgcgtgtctaagggccctcagacttcgtccttggggtaaaggtatcaatccgcaggtctgcctctgtgttggggttcagcctgtgtgtctaaggctggggctgtacatctggcagttagactttgttcacactatgtccttaagtcagactgatttttaggtatcacagcatcgaattgacatttggagtctggcacactctgtgctaagccagtgacatcatggtgttgtcagggagtacagggtgtttcttgcactagtcacaggtctgcctttctgtagaaggtgggatctgagctccattaggattatccaggtgatccccctacccctagcccaggggcccccacatgagtatgaatgggagctgggggaagcaggttgagaggggagatgttaaatacaggcttcagagagccaccctgcttccatttctgaagtagctccttgtctgtagagaacccttcattaaccagggcctggctgaccagtgtcctctggaaacaccctgtctggacatctgaggagttcattttctcattctccagcaaacacataatgttctctctttaaagcacaagttatcacccgtggatggatttgtccttttctaaggaacaaagactaactccctccattccccttgttggagttatctccccttgaaaggacactccacagagccagaaattctagaacagggaaaagtggaggggacgtgcctgtgaactgcagggacagaaggaaatgggtattgggagaatggccagccctccaaggggctgatgtctggcctgggtatggagtcccacagaaaggggacctgtgatgcagcttacattgtcccgtgagggaaccatgatcctggaacccagatgaggccaaggaaatgttctctgaaaaagtcatatttgagctgagaactgaaggaactaactgggagaagggaggaaagagtgcttcaggcagaggaaacagcatgtgcaaaggccccaaggcagaaggaacaaaacacattagaaaattcagaagaagaagagtggcgtgggtgcaaagtggaggggagctggactttgggttttgtttgcttgtgcccaggctggagtgcagtggcaccaccttgggtcactacaacctccgcttcctgggttcaagcggattcttgtgcctcagcctgctgagtagctgggaatacaggcgtgtaccaccacactcagataattttttgtatttttagaagagttgggatttcaccctgttgaccatgctggtcttgaactcctggccttaagtgatcaggtctcaacttcccaaagtgttgggattacagccgtgagccaccgcacccacctggaaggtcataccacagatgtttgcctttatcccaacagcaatgggaagttgtgtgtgtgtgtgtgtgtgtgtgtgtgtgtgtgtgtgtgtgtggtttaacatgtttaacataaaatttatcatcttaactgtttttaagtatagtgttctgtggcattaagtatattcacagccgggcatggtggctcatgcctgtaatcccagcaccttggcaggccaaggcaggtgaattgcttgagctcagaagttcgagaccagcctggccaacatgccaaaaccccgtctctacaaaaaacataaaaattagctgggcgtggtaatgtacacctgtagttccagctacttgggaggctgaggtgggagtatcatgggaggctgaggagagaggatcagttgagcctggaaagtggaggctacagtgagccaagattgtgccactgcactccagccaagattgtgccactgcactccagcctggacaacagagtgagaccctgtctcaaaaaaagaaaaaaaaagtatattcacagtgctgtgtagccatcaccactatccatctccagaactttttcatcttcccaggttgaaactctgtactcattaaatgataactccccatttctccctccttacagcccctgacgaccaccattctactttctatctatgaatttgagcactctaggtacctcatctaagcggcatcatgcactgtctttttttttttttttttttttgagatggagtcttgctctgttgcccaggttggagtgcagtggtgcaatctcggctcaccgcaacctctgcttctctggttcaagcgattctcctgcctcagcctcctgagtaactgggactataggtacctgccaccacgcctggctaatttttgtatttttagtagagacggggtttcaccatattggctaggctggtctcaaactcctgatcttgtgatctgcccacctcggcctcccaaagtgctcggattacaggcgagagccaccttgcctggcctatttgtctttttatgacttgcttatttcactgagcataatgtcctcaaggttcatccatgttgtagcatgtattgaaatttccttcctttttaaggctaatattctactgtatggatatgccacattttgtttatctattcgtctgtcagtgggttgcttccacctcttgactcttgtaaatagcactgctatgaacatgggtgcattgaggggttttcgacataatcataataattgctttatggagaccagcttggaggagaacaagatggggaggaagtgtggaaaccaatgagaaggctctcagggtatagcgggaatacagaggacgcatgatgatgcctggacttaggtggtaccacagggatggagagaagtagatagagtcaagctatttaggacgtgaaatagacagcatttgttaatgggagaggtgtggggcgagggagaagaatagagggagaaggaggagtaatgggagctcaccagcagcccccatgttatgcctctttccttccttttccctcttctctcatcaggcattcagcttttgctgagtacttctgtgtctgacaacaggctgagcactcagcactgcaggacaggactatgcaaaaaacctctgggcctagtcctgggtgcactgctaattccctgtgtgaccttgcacaagacatccaagctctctgagcctcggattccccacctgggcaggaagagtaagtccctgcctaagtcatagggttgtaatgaagagcaaagcagaccatatctgttaagtgttagggacaagacaagcatgaggcatattttcaagtctcggctcctgtaggcagctctcactaagggctaaagggcttctgatgcctgggatagaatctgtccggcagagtggagtggaggcagggggacagccttcagctgtggaattcctccagtcctagagaccagcctgagctgggggacattattccagtcctgaggcatgagagcagaaggccgatgcttctgccctccatcctaatgtcctcctgcagggacccaaggtggatggcatcgatccccccgggtgagctcagccctgggcgcatggtggggcccaacatctcaacctgtttcctaaccctgagccaggcaggacagatcccagatttgtgcccaagagatgctctggcatccatgcccaggcccacatagggatagagggcagggtgaaagtctctctccctcactcgggtcctctggagaggggctctgtgtcatgaagctgaccttatccgcatctggtctaggagggaggagggaaggagctgccagtgctaaaatctcccccaccctcaaagggggacttcacaggttattgctggttttggttgttggaagctgacagtgatttattggcagattgaagtgagtgtgtgtgcgagaatttaggatagaatctactgatagcttctgaggtttaccttccccaggtcttaaatctggagataataaaaatataacagctaatgtccaaagagcacccgctgcgtgtgaggctcactgcactaaatgctttccatatgtttctcacaagaaccttctaggtagcactattatgattcccacttaatggatgaggaaactaagctctagaaggctaagtgactaatccaaggtcacacagctattatgtcacaggctctgagcccaggtgtatctggctgcggagccaccaccactaacccctgtataacgctgcctcacagaactgtggctggctctttccgtatcccccatgcccctgctccatcatcatgctgtggtgggctctgaactgtgaggacagggatccaggctttcaccctctctctgtccctagctgccagtgcacttgggcaaggtcacatcctatttctgggcctcagtttcctcatctgtaaaatgaaaggctggattgaatgacctttaagatttccctcacttggaaattccacaagtaagtcattatagcatggagcttgcatgcatgggctccagcgtcaggccagcccagctctgccagttaatgggtgtgtggccttggatctgttacctaacctttctgagcctcatttcctttgtctgagaaattgggggtgacggcagtgtactttctttgaaaagttatggtgaggaatagataagatcatgtgtttaaagtgcttacttggcacagtgcctgtaacttagttaaattcaataaataaatttcccattcttcccatgatcatttatttttaagggacatttgtctgaccagtttgatttatgagattattggtgtttttcatgaatgttaagacgtacgtgcgtcatcttagagtcatgtactctgatatattcacacgtgcacatccacttactcggaaatgtacacacccaggcacgcttattctgtctccttctctgccacatacttgcacacattatgtgagtgtacacacatgatgcacacacgtctctgcgatcttccatctctcctcggcagccctgctggtgtattggaccctggccttcatcaccaagaccatcaagtttgtcaagttcttggaccacgccatcggcttctcgcagctacgcttctgcctcacagggctgctggtgatcctctatgggatgctgctcctcgtggaggtcaatgtcatcagggtgagggtaagcaggccacctgggccagggtggggtgggaagcagaggctctggcctctgtcctgccctgggttcaggcccccaccctgcttctcagccaaactgagaagggatcagcttgttttacccgcccgtgtaaaggggagtggggccgtggcggaaatttcaggatagacactgcatctggcccacgtgtgctctaccccagggtcccagagggagaggggggtgatgggtgtgttcgctgaggttggcggatgactttccgtagaaagggaagataagcatcaggcactggcctctcctactttctttcttcgggggtgggggactttgctttaatgtattcatatcgtcacgctggtaaatgaatgagtaagtgttttgttttcctttctgtttgctcccgcctccctctctcttcctcaccccagactccaaccttccccttcccctgcccctacctccccaggcagcccagactaatgaactcgtttgtctttcccatgctttgtttttattagtataataccatatgtgtctgtctaaataaatacctattcaggttttttcctctcaacacaagtgaatatgtaggtttcccccacggtatttatcttgtaagaatgggatcatattatgcagttttctgcactgtgcttttctcacccaacaaatatctcttgggactccctccaagccatctgatatggctaattccgttttcttaatggctgcataatattccatcgtatggatgagccataatgtgttcagctatttctctatggatgggcatttactttgttgccaagttcttgccttcatgaataatggtgtgttgaacatacttatatatttatgtattgctgcttttatttctatgggagagagtccaaggaatggcgttgctgggtcaaagggtctgtgtattttaaattttgatcagtgttacatattgccttccagaaagactgtaatctgccagcaatgagtgagaaaaccctttccctgccttccaaccagcagtgagggctacagccctttcgaacttggactgcctgcatttctctgactcttctgcttttagttggtgatctgcagggcacaaagctccttatgtgtccccccatccagtgaccctcacaggaaccctgtgatgcaagcaccatcccctttatagatgaggaaacattttagatgaggcttgtccaaaaacaccttgctagtaagtggaggaggcaggattcaaaaccaggtctgcatgacttggagttctgtgaactgtatatgaaacatggtggtatccttagatctgtggagaagatagcatatgagagattcctgctcctccccaacccaacctaaacccaacccagcctagccatggggggttcaaagtcgacctcaatgagcagttacaaagtcaggatgccctgacattggtggccaagaagtgttggggaatccttttcctggtaataattacaggcgaaagatggccccatctgttagagatcaagtgtggaatatcacaaccccagatccttgctggggcaaggtagggagtggtgagaagttggacttacccatcccccatggcccatgtgccccacagagatacatcttcttcaagacaccgagggaggtgaagcctcccgaggacctgcaagacctgggggtacgcttcctgcagcccttcgtgaatctgctgtccaaaggcacctactggtggatgaacgccttcatcaagactgcccacaagaagcccatcgacttgcgagccatcgggaagctgcccatcgccatgagggccctcaccaactaccaacggctctgcgaggcctttgacgcccaggtggtcagtgggggcacagccacaccatctattcactgccttctggtttagggtcacagagagggacctcaaagggcattaggtcaaaatcctggtgggacaagaggggaaactgaggctggtgaggggaagaagcttgccttaagtcacacagtgaaccagggacaggtgcagggctgaggattcataggacaggcacagttggaatggcccttaccgtttaggtcgtctagtccaaagtccttatccagatggggaaactgaggctctgagaagggaagtgaccccactggactctcacatccctgtgctctttcctctgcagcttactgactataaaggttggagtgttcacttgatttggagcaggggtgttagtggcctgatccttatggtaactctatgagttgagccagacaggaatctccccatatcactgaggagcaaattgaggccctgagaaaggctgtgacctgcccagagctggccacagctggcaggcggcagaggcagtctcctggctcccagtccagtgctccttcacttcctctgccctcgcaccagggcagttgctgaggcagacacggtggcaggtggtaatgagtgagtgtggcacatggccacctcctcattccagtgctgtgctcatcacatagtccctgaccagctgtgtgaccttgagcaatcatctggccttagtttccccatctagaccatgttggtgttgatagggccctcccaactgtgcacttgctgattccatgatctcttcctggagttcacctatttgcagaggatgtgaccactgggtttccccagacaacaggagctaggggcatcctgggaggctaggcccagccgtgaattagccctcaggcactctgacctggccatggtctctctgggcagcggaaggacattcagggcactcaaggtgcccgggccatctggcaggcactcagccatgccttcgggaggcgcctggtcctcagcagcactttccgcatcttggccgacctgctgggcttcgccgggccactgtgcatctttgggatcgtggaccaccttgggaaggagaacgacgtcttccagcccaaggtaggcagccccaggggtagggtaaggcaccctctagatggttttcagttgtttctgagagtgcaacaggccaatgtgtgtgagccatggccacactggagtggctcctcacacatgcgcaaagcccatagcagtatccccaccacagaatactctacatctggtcaacagaaatgccagagggcgagcctatgccccaagggtatcctactctcctctcaccgtcactaccatagtacctctcccggtagttaggtcagtccgaaaactgcaggaagtgcttttgtttgtccagtgtctagagcttctgtgacttggatttgttggctttcagttcatgtcatcttagtaaactctttaaaagttttcaagatctgtcttcttcagtcctgtaaaggctggcacttgagctttctgcaggggcatcttgggagctactgtcagaggagagagaagtgggaaaccctcacgagtggagctttgtctctccccactccaaatttcattcaaagctgcccgtagttttattaatatgttggacttttccattaaaatttcttttttaagaaaagtttccatggcttaaaaaacactggagacttattagactagattatatccaatggccttggcagttgtaacgattctgcaaactgaaatttgttggagctagaaaacctttccccggggttatttgccctgcgtggggccgtagcatccacttcgggggctgggcagactgtgctctgttgtctgtttccttgcagccgtttaggtttaaatggccacaaaatgaaaactttttcacccctaataagtttcagagttttagtttccaagtgaggatgtcattataacattttaaccacagacagtctgaaaataatgcagagaatggggaattagggtttttaataatttatgacaccctttgcgtaacatttgttcatctcatgagctccaaaatcgcagccagcagttaatcctcaggaggtttatgttcatttttctggagacataattagtcagctgaacagttttggccacagatatgagatacgttgagtctgatttatgcagcaaactttcattgaacactgctgtgtgccaggcctgggttgggctgtgggaatatgaaagcaatagttatgatgaggatgattaacaatattaacagccacttactgaccacataatacatacctggctgtgtgcaggagttatccatgtgttatttaatccctaaaactatcctttggcgtgagtatattttgcaacatctttactgtggtatacctcaaatactgtacagtttatgagatgataggtattcttatccccattttacagatgagaaagttgaggctcagaaagtttaagtaattttccccagggtctctcagctagttaataacagaggcagaatttgaacacaagactcactccacagtctgggcatttacagccaggaagctaaattgactattattatcaagccatcacctctggctccaaggattatgaaatccaacagtgaggagagaaatcaaaataaaatacttttatgctatgtgttacatgtgactcttaggaggaatattcagggaattgtgggaaaagatagtgattaacttagccagtggtcatgaacagcttcatagaggaggggatgtttgaaaggggtcttgacggatgagtaggaatttgccaggctgccatgggaagatttcttgctcaaccaagaatgcaaggaccacttttgcttatttaaactttgatggcttttgaagccatatctggctttttgagcctctctactttacctggcccataaaagagaggggaagcggctgcttctcttgtctacaggagtgtcacctttggctctagcctgaccataggctaccccagaatacccccattggcgatcctgaagcagcatggagccagttgttaatatcagggggaaatggcacaggccagagcccttatcagagtgtccacaccacgctcttcttcctgtgtttcccaaaacccttgtgggattctgctaaggagagagctctgaggcaggacgtgccaaagagatggcgaaagcacttagaattttagttcatctgaacgttatcattgccgtttttttctctttgtttatacacaaaccctggggtttattaccgtctcattggaatgctcttgtcccagttacttagcacacaaatccctgagacagatggccctgcctcagtggcagtgggccttatcagatttaatattttttccctgcagcccaaacacaatcagaaaatttccgacacagaaacaagagttgaaagtaaatatagtctccagtgtccgcaacaaagaactctccatcatgtggttgcctgggatgtggcttaattctcatgtgggcttctgagctcagaaaatgggggaaagggatcatttactgagatcatttggttcatctcccagcccccaagccattctaatccagagagaaccgagtgctattctggtctttatgaatgacaaagaaggaagctccctagctacatgttgcagtgtttcacagtctgggagaggaagccgttttttctgcccagcctgaatccatcctgcagcagttggcacagcgaggcacctgtggtttattcatcatcactcttccttcctaagatactcagagttggcaagaaacatgtcatccttggtatccgcaaggacgaacatttctgatgtcctctttagttactgaaagtgtctgtgacttgccagatctttgatgctcctgtcaccccgctgccactccccagggaaagctgggacccaggttgggctctgcctatgatctatagctctttccagcctcctctccaacccaacccctactcccaatctgtcacctcccatggatgccactgatctggctgaaggacaagagaattagattcataatgagctgctggtgtctgaaacctgccagcactgccctgggctatcagttgagccaaaggaagaaggaacagtctgggtttgatcgaagggctaaagcttcaaacagcctctaagtctcagtaggaaaatgtgtaggtttgggagggtgtatgtgtttccgaatgagttcccctaagaactgcttatggttctatatgtgtgttctgtttgtccctgtgtcttttggtgtgtctttttctgcgtgtgtgtgtgcatgtgtgtgtgtctatgcccccgtttggattgccatatttgtggctatcattatgagtgacttaatgagtgtatatgcattggtgtttctgtgactttgtggttttgatgcatgggctggcctcttcataaccatgtccatgcagctggtctggcctagagtacctgccttcaattcactagctccttcttggccatcaagactctgctcaaatgtcacctgctccagggagccttcacctggttgaattagatgccccttatctgtgctcacataacatcctatcaaagcgccctgtttctttccctgacttgatcctctgtcccctattgcctgacctctgtgtgcccagcactcagcccactgcctgacacccaggagatgcacgggaaatggttctgcaaagaaggaataatgcagcaattactatatattgagtgcttacacttactgttttttcacatgcactgttacattgacttctcataacaactctctgaagtcccttcatagcctcaccttacagatgaggaaactgaagctaagagaggttgaggaacttacctaaggacacagtggctaatatatgatgagtcaggacctctaagtccaggctcttaaccaccgtgtcaaacagtcttgtatgaatgggtaggtgtgttggtctctgggtggccaaagataattttattctttacccagggcctcccggggctgggacctacggacaactcaccttttgacacctgccaaaataggaaacaagagtccaagtgatcccctctcctttaagcaccagagaacatgtgaaggggacctttccaatcatacctctggcctggcagagacaatggggctccaaactgtagagtcgggagtgctgggttttagtcctacctctgcagctaactcatttattctcctcagcagtcacattctgcaagcctcaaatgcaaaatgtgtaataacttctgtagaaagtacatgggggcatgaagatcattggcttgattgcttttaaaaaatcggtattgagcactactggggaaatccctggaaacaaacacaattcttccctgagagcttgtgaaaatgcaagactagggcctatgattttccaaagcattttcttccaccaagtgtcaggttgtaggtccttggtcttttctctcttgccttggtacctgcagggtgctgaccagtgctatcatatcccctccccgtttcctaggaccctcttctcggtagactccaacagggcctgccttccttgggcagcatggcaggcctcttggctagtctagtacccacttcttttttttttttttttttttttggatggagcctcactctgtctcccaggctggagtgcactggcgcaatcttagctcactgcaacctctgcctcctgggttcaagcaattctcctggcccagcctcccaagtagctgggattacaggcatgcatcaccatgtccagctatttttttgtatttttagtagaaacagggtttcagcatgttggccaggctggtctcaaactcccgacctcaggtgatctgcctacttcagcctcccaaaatgctggaattacaggcatgacccaccacgcctagtcaggtacccacttcttaactgaaacttagctattccaggttctatcccttttaaaccaactctttgaagagaggtctaataatgacccaatgacttatagctgcagtgagatttttattttaacaggtcacaaaattctcaatccacaaaagtagatttctgaccctaggttattttgttgggggcggagagaggaagtcaaaggttttgcagcctttagagctgcaaaaccagaatttgttgttttgttaaaaatgcacaaataccgacgagtatatttaagtaacacccatagtctaacgaacaaacatgatcagttggcttttccagccctcattctccagcctgtgtgttttctgctcattgtaacacagcgtgtgtgtggcattccatgtttctccagagctttcatgagaatcagtggtcttggatgcatagtgttcccatgagtaccttaattacctaaccattccctgtggttggaaatttatatgggtttttgcattctccttctgctctgaccccaaaataaatgtctgtgttcatacagctattaccttatgtgaaattattttctttgggataaattctcatgatgtgttgttgctttaaaatagtggactccagtctccagagctgcgtctctgcagaggacagtgggacagaagaatcccagggcatgttaaaaaggaccgggtcttcctaaacccacatgcctatatttctgacccagtaccagccaggggggcaagtttccatcccccacaagtcacaaacctgtaactgacactaggatgcttaaggtcaaaggcctggacgaggcctagacagtgggtctggggtagtgtttttgacatcactcaggttcatgttcacatgttgtccccttaccagcatgtgaccttgggccagccactaaccctactgaaactcctttttttcatgtatgaaatggggctaataatggtaccctcctcattagggtattgtgaggatagagttttgcacctgataaatattgtctcctgccccttcctcccctggaaattcaggtctctccctgcagcctaattttaaggcccatttttctgcttccagcccacccctgcccttctaccttcgacctcctccctctgcctctccctctggtgcactggcaaatgggacagagagcctcggtagggccttcctcttagagtcttgcacgcatccctcagtggtctccctgtggctgcttcctgctgccaccaacagatacagacccctgtcgcacagatcatggtagagacagtggtgagcaggaccagacagctccagggagcagtgagggctggcttagagaacctctgttaaactgagaggccaccatcaggaagctctgatccaagatccaggaatccctgactctagggaaaggcctccaatgagagcctgggccctctctgcctgattctgattgtggatgtgccctcaaactccttctcatcactttgttccatccctctttaccctgcagcagctcccacaccctgccaaacaggatgcacagtccagggcagtgtctgagaaagagcagagatctgtcttcatggaaatattgatgtggctctgctggggagcaatggatttatcaagatcaaagttttcctgggagttattgatgcttaatttggaaatagacacactgttgatccctggtatctttagcaacaaagttaaaatgtttgtttttcttcactggttgccatctgagatcttgccggaagtacacaagagaaccttaaatttaacaggaggccctgggagcccatgaggctggcgggcttgggtctgaaatcttttcagtctcttgtaagtgatgagctctcattctctcctgagagctctacggtgccatgttttccactggccttttctgctcagtaattgctacattacaggctgttggtaagttcggaacaagggagctgctgattccatttctgtagcagagaacatgcaccgtgagacttgttgtaccagttcaggttttaggtgctctatttattcttgccccattcagaatgctctcccctgggtctgtggccacaatgctaagagtcatatttatgggcctgcagttgtaattgggccccattctgttcccccaagtggaaagatgaacagggtgtaagcaaccttccctgtagttagaaaaacgtttagttggatttatcagtctgatttttcactcataaacaattgcacaagcctttgcaagcccagagggtcttgtaataatgatggccgtggtccattatggcacagtgatgtgttctacggtggtcattttgctggcaatgacagtcacctctgaacttctctttccaacagacacaatttctcggggtttactttgtctcatcccaagagttccttgccaatgcctacgtcttagctgtgcttctgttccttgccctcctactgcaaaggacatttctgcaagcatcctactatgtggccattgaaactggaattaacttgagaggagcaatacaggtacttggatgattattttttcactttgccataagaaccattattaggaataatgtccatgagtgttattcatcctcatggacactcaagaataattctgctgtaaatttattttttgttgcccattaacgatgttttaaaacagtaaccattgacaaggcagtgtgggatagtggaaaatatcttgggctgaacttgggagacagtgtagctctggctctggttctgccttggactgggtctgaaaatccagctgctcagcccttggcttgaaagtggtagacgtcactaattgatcacagcactctttctgaccaagggtaaatgcaaccttggaatcctctctaagtggctgttccagagttctgctaccagacagtcttctttgggtgtgaaaaaaggaatgtgcttgacatacaaggtctagatagcctctaagacagggtcccctctaagatggggtattggtccatggcctgttaggaactgagccacacatcaggaggtaagcagtgggagcaagcattactacctgagctctgcctcctgtcagatcagcggctacattagactctcataggagtgcgaaccctattgtgaactgtgcaggcaagggtctaggttgtgtgttccttatgagaatctaatgcctgatgatctgaagtggaacagtttcatcctgaaaccatccctctcccccaggtccatggaaaaattgtcttccacgaaaccagtccctggtgccaaaaaggttgaggaccactgctctaagttctatttgaacccttaagtcttgctcactaatgagagtgacctatttggtctgttgggtcacttaagtctaggctcttggtcctgccttctgtgatttccttcttagagtttctggaaagatgatcaaagccagggagtgttcagggcccctctgaagaaggtgatgatgagagttgtccaagtcccagggtcttcactaggattttggttcagctatcagactagagagacatcctgattgagagtagtttaaatgggatagaagtttgtttattcttcagatagagtcagggctgacacaggagctactcaatgatcagagacctggcttcttctgtcatgttgctctgccagccttcttttgtgacttttgtctccatagccatggtgggtattgaaactgccactatatttacatttaaactagccagaagaagggacaagaggagggaacgcattttccttttaaaatggtaatacctgatttgcacataccctctcgcatcccattggtgagaaagtggccaaatggccgtatctagagagtctagaaagagcttggtctttattcttgacagctatatatgcactgctagaaattctctgtgcaaagaggagaatgggcattgggaataactagatgcagctatgcctagtgatgtccatgaagttgtggtaaaatcctgaagctaccttgttctttggaaatgttcctcagaatcattaacattagtcatgtgggagacaggagaagaagctctgcagaaaagggaccgagaggacaaggatatagcttgggctggggacaatgtcagagtccaaactctggctatcttggaatagtctgtgtgaacggtgccctcccaagttgtgcagtgcacaacctgtgcagctatatatggcaaccctgcccatccccagtggtttctcactgggaaagcagagtatttcctcagggatgtcattatgtgacaatagtggaaaaagcccaggaaaatctaagaccttctaagactcatgggggcccagagctgggaggaaccaagctgttgctcagttcagaaaacttctctagaaatcccagcctctcctcacacccctccagtgacaggcagacttgcaccaccacaagcaacagccacttttgtggttgggcagttttgtaattaaatatactaatgtgtgtatgtcataaattacattttccaattatgccaaaagagccaaaaatggttttttaatggttagcatataatcgtttttatcaaattgcttgaatctttcatgttaataagagagattcattactatgccacaaaaagcaaatactggcattaattatagaaacaaattaggggggtggagcgcaatggctcatgactgtaatcccagcgctttgggaggctgaggcgggtggatcacaaggtcagaagtttgagaccagcctgaccaacatagtgaaaccccatctctactaaaaatacaaaaattagccaggcatgttggcgtgcacctgtagtcccagctactcaggaggctgaggcaggagaatcgcttgaacccagcaggtggaggttgcagtgagctgagatcgtgccactatactccagcttgggcgacagagtgagacttcatctcaaaaaaaaaaaaaaaaaaaaagtggctcatgcctgtaatcccagcactttgggaggccaaggcgggtggatcacaaggtcaggagatcgagaccatcctggctaacatggtgaaaccccgtctctactaaaaatacaaaaaaaaattagccaggcatggtggcgggtgcctgtagtcccagctactcgggaggctgaggcaggagaatggcgtgaacccaggaggaggagcttgcagtgagccgagatggcaccaccgcactccagcctgggcgacacagcaagactctgaaaaaaaaaaaaaggaaagaaagaaggaaaggaaaggaaagaaaggaaaggaaaggaaggaaagaaagaaagaaaggaaagagagagagagaaagaaagaaagaaagaaagaaagaaagaaagaaagaaagaaagaaagaaagaaagaaagaaagagaaagaaagaaagaaaaagaaaagaaaggagttagggagaaaaaaaccctttctttctttcttttggagatttccggaaaatgtacccttacggatgagagcctgtgtcttcatgggttagagaataaccacgctttgtgcataaaaagttattaagcacaattcctgaattatacataattactagctgtcagtcagttgtgcatttctgtgtatgctggtcttcacttaataagactttatttcacagatcacttggtgtccctacttcactgaaactaggtgattatcttttgaagtctcatttcacataacctaggaggtatatagatttctttaaaaatgtcattgccattattttaaaccttacccatggtatatataaacttacagaaagacagaataggttcattattttaaaccttgcccatggtgtatattagctcacagaaagacatagaataggttcctgccttaagaaaacctgacccacaaaaaagcctgggtttacacaaaagaggaattaagggcggggagcccaccttacaacagaatgaataatagaattttatccaagagcaggcatcctgaggacatttaagacccggatgcatttttccttgttcaagagcacacatccaaaaattgcagtctttctgcgagtcatgatcactctgcacataaagcgtttaggttcagagctcggggaggccattaccatggctgctctctgtctgccctgtgagggtccttggggtggctgcactctggggatggtgctggggctgactgactcacgcggtcgtgtaacacatcagaccttccaaagtcgaacccttgttttgtttcaaggctcaattatgacaggacttggtctcagagcagatcccctccctaggctggagaaggccactttaaaacagatggcctgccccacttcatcatttttatggctctgatctgtgttctccactggcctctggtaaatcaagaatacaagtggacatgaagatctgctttaaaaaataaagaacagaccgggtgcggtggctcatgcctgtaatctcagcatttggaggccgaggtggatggatctcctgaggtcaggagtttgagaccagcctggccaacatggcaaaaccccatctctgctaaaaatataaaaattagctgggcatggtaggcacgtgcctataattccagctactccggaggctgaggcatgagaattgcttgaacccggaaggtggaggctgcagtgagctgagatcatgccacttcactccagcctgggaagcagagcgagactctgtctctaaataaataagtaaatgaattaaattaaataaaaataaagaaccaattaagtcctgtctacaggaaaaggccttacttgctggagaagtagcttgctgtgctggagtagactagtaagttggaacggtgatacagtaccaccttacagagctgctctagggcaccatggggactgtctgagaagcccctggcacactgtaacaggtggcatctggtgtggtgatgatgatgagaatgatgatgaatgtgaaacactctgctctcatttctagaccaagatttacaataaaattatgcacctgtccacctccaacctgtccatgggagaaatgactgctggacagatctgtaatctggttgccatcgacaccaatcagctcatgtggtttttcttcttgtgcccaaacctctgggctatgccagtacaggtactagatgggctgaggggaagggaggggggcagcaggacacacaaccagaatctgctggtccatggccagtaactaggagcacaccgtcttccactccatgcttgcctgtacctttcacacacttggctataccacaggctgtacctctgggtccctcctgtcccatactctgcaagcactgaccatctctcttaatgaccagagaaggcagtatcattaagactttaaaaatggagccaactttataaactatagaaaaatcaagccaggttcaggggctcacacctgtaatcccagcactttgggaggctgaggcaggaagattacatgagcacaggagttcaagactggcctgggcaacacagtgagaccccttctatgcagaaaaaaaaaagaagaaagaaaagaaaaatcgtacatggaatgcccacagatcttaaaagctatgttgtagcaaaatatttaattacatcaaaaagtgttagtgatgtatttttaagcaaaaagagtaagttacaaatagtatatgttgtatgcttactactaaactggaatatatgttatgtatacatttgtacagattcacacatgaaaaagaattggaaaatcacatagtgggattataagtgatttttattttctttatgtgtttctaaattctctaataagcgtgtataagatttggaaatcaacaacatgatacttttagcctaggcaacaaagtgagaccctgtctgtacaaaaaattagctggaagtggtggctcacaactatagccccagctactcagaggctgaggtgggaagattacctaaagtccaggaggcagaggttgcagtgagctacaatcacaccactgcactccagcctgggcgatagagtgacaccttgtctcaaaaacaaacaaaacctggtgttttttagccagatgtggtggtgcgcccctttagtcccagctacctgggagtctgagatggaaggattgcttgaccccaggagttcaaggctgcagtgagcaatgatcacgcccctgcacttcagcctggacaacagagagactcctgtctcttaaaaaataaaaataaaaacgttaaaacatggtatttttttaaagcaagacaacctttggtgctggctcaggaagaggtacattaccccccaataatcagaggagaatcgtcagcatgattgatctgacctcgggcttcatgtgtcccatctcccacccggagctcttccaccacagagtctgatcctgtcctatgcctgggactaaatcttcaccctggtgttcaggccagaaaccgaaatcccagacccattcccagagggcgggaaggttccaccgggagagcttgatgtagcagaaagtgacttgggtgagacaggctgattcaaatacttaacctctctgagccttggtttctttatctatgaaatggggaggctgcccaccctctggagttgctatggcaattcagttagataatgtaagtaacacagcaggcagagtggcccccagagtcttcacttcgtaaatatcagatccctctaccttgcacatgtttggtatgagtgaggtgttaccaatccagaatccattgcttcttgggataaagattccataaaccttcatctccagtgatttgtattggtcctccttacttgtaaagcttagagtttaaaaatattaaaagaaaaaaaggggagaggctcccacagggacacagctagacaagatgagatgcagggaatctgatgttcttttttatgggaacagtcatatatgccatcccccattaccacctacccatgcccagactgcccccgctccattctgccaagacagatcaatgactataaaagctacaaaagggcctggagatctcatctagtttagttaccaaccaaccttttatgcacaagactttctaagctgggtgtggtggctcatgcctgtagtctcagccactcaaaaggctgaggtaggaggatggcttgagcccaagagttcgagtccagcctgggcaacatagagagacctcatctctaacacaattttttttttgaaacatgaaaaatgaagatttctgaccatgcttctctcattagttaacactttgggctgtgagggtctgatgcagagagacacagcctgggaggatcctaacatgtacacagcattcaaaaggctacaagacactttctgttgtgtccccttgaacaagcagtttgtaagattttgttggccaggcatggtggctcgctcctgtaatcccagcactttgggaggctgaggctgatggttcacctgaggtcaggagttcgagaccagcctgaccaatatggtgaaaccccgtctctactaaaaatacaaaaattagccgggcatgatggcgtgtgcctgtagtctcagctactccggaggctgagacaggagaattgcttgagcccaggaggcggagactgtggtgagctgagatcgtgtcactgcgttccagcctgggtaacagagcgagactcggtctaaaaaaaaaaaaaaaaaagaaatcaggttttgtctactaaacctgctgcacggttaccgttactagtactcacagggtttgttgcacatgcatcgttgctaatagtgctaactaatattaacagcccttgccctatgcctggccctgtcccagcccccctcccttgtataatttaacccttgcactgggggtagagattttcatatctactgatttcttacctttgctcatttatcatggagtgtcctttggttttctgtgtttgtatatacctttaccacttatagatttgaccagcactcaagaaccagtgttactcctgggagttaatacaatcccagccccatggcaaagaaactcatgtggttaggattctgtgtgcagcctggttagccacagggcacgtaaggctttttataatattgacatgagtgcagaagccccattcccgtgtaagccctgagggctcttgtttcataatctttttttggtcacatgcacacagctttattgagatataacccactcatttaaagcatacaaatcagtgggttttagtgtcctatattcacagagctgtgcagccatcatcacaaatgtggaagttttcatttccccaaaaagaaacccgtacccattggcagtcactcctcatcttcgcccccagcccttggccaccgtttatctacacatacttttgaaaggctagtgaaactttctcagaaaaataaatgcttgctcaaacatttgggctataatttcaggggcttcatgggtgcccccctgacatttatcaagaacaccaggttaaggaatttagctataatggaggcctctgtgtttcccagtctcctgggtatcagaggcccagagagggcaggtgccttaccctgggccacgcagtgaaccagtggcagcaccatactcacacatctcctttctgcggttccccagtgacagagttctcaggaagctttttcatttattttctgagaggagggtaggccatcttgtattgatctccaactatatgccagccacaattctaggtgcttatcataaaggttcatttaatcttcacaatagtcctgcagagtggacagagtccttcagagtgggcattataatcaccattttaaagatggagaagctgaaaaccagagaggttaagtaactcacccaagactgcacagcaaaaggctggggctttgaaactcagggccacagactccaaagactatgtcctccccactatgctagatttttttcctaacctgtgaataggagacaaaatagtccttttatttctcacagttgctttgcacactcagaatccatgatttcttctgcatgagggccattcagacctgtgcagaagagagtaatggaccaaggagtcttgggagcacctaggaggaggggatgggggagcatgaggaggagccagggaacagcagcagctgcagcaccagctcccaccccagcctctgccagtctcttggaggtggtgtgggtgcagacaccggctcacaaggtgccctgttagtgagcttggggtgccatgggagccttcttgttgtcaggcccaacccaagctggctgaagaacaccctgatggcctccatttgagcacaactaatgaaggactggatgccagagataagtccaggagggtgatgctgcagggcaggccagggaagagggtacttcatctctatcatggtcctctgcccatccatgccagcatctaacacctgttaaacactgggaggcaggtggtgaaggggccacttcccagcctctaagatacctcctaagccaggaggcattctgtgattaaattacagggcctcccacttactcctttatccttgaggcggtgctggaagcttaatgccaatctggtgtagggctctgggactacaggaccaaggcaagcagtcctttctctctctctctctctttttagctaaggaagccagcacatctgttctttgagaaaaagccctgtatttagaggtgtctgcctttgaaggcaacctgagaaactgtcatcttggcgctttggggactggccatttacacttctcataaatattcagaagtaggcagtcatttacataaagctaaatgcagaaggaattctcttttcagggaatacctggcagattcattaaaaaaattaaagaaaccaagagcataagaatgaaaagcgaattctcggaccccaggctggttttttctggcatgggtgcagtaactttgcctctttgctcagttatcacttttttccaatgacagtaaccataagccctgagagccagcaaatagaacaaaaggtgctgtcacaaacattgtgcaatctcatctctgagatttccatctggaaaatagactggagagagttaaggcttcaaccagccttgcagataaatgcagttagttaccagcccagcaaccctctgcttgcatgagagcccattatgctaacctccttttgaaattgctttgtttctcctccttccctgcactccactccccaagataatttggaaacctgggcaccaaggcttgtcccactctaggggactggggaaacagggattttgccagcacctcctggcagggcaaccatcaggtcaaagggacctgacccatgaccccttcctcagatcattgtgggtgtgattctcctctactacatactcggagtcagtgccttaattggagcagctgtcatcattctactggctcctgtccagtacttcgtggccaccaagctgtctcaggcccagcggagcacactggtgagtgcccaaaggtgtgtgtgttttgtccctcttcccctccttccctcgacagcagcaggtctcctcccacacacccacactgtcattgactttgactttgactttgagtaggccacttcacctgtccaggcctcagcttctttgtctgggaaatggagtcaatgggggaggaggctgcctcccggtgaggacaggaggcgggcatggcagtgacagtattgacactcaggccttcctctcgggtgggagacggagcagaagcctctcccctctgactcggggacccctgcaggagtattccaatgagcggctgaagcagaccaacgagatgctccgcggcatcaagctgctgaagctgtacgcctgggagaacatcttccgcacgcgggtggagacgacccgcaggaaggagatgaccagcctcagggcctttgccatctatacctccatctccagtgagttcaccccacacagccagccctgggtgctgctgcgtacatgcaaggagagggtgtcagagctcgggtaagagggggtgcagggacagaagcaggaggccttgagattatccgactcagtaggggagcctcaaactggctctgatagctaagctcccagaaatcaaagtactcttcattcatttatccaacaaacatgcatggaaagcctgctatgtgctggacactgtgctggccctcaggatacagtgatgaggaagagagatgaagtttcattcctcatggaactgatatgttattgacagacagcagcaagtaagtaaatgaccacagttttgaactctcctaagaatgaagactttttagtaagtcagactgagctgtcattgccctggggaagctacaagaaagcttccatccacttggggctatgcaaaagaaaaagactagttatccttaaatatcagaagcccaggctgaaggtactcacaggtgtagggactgaatttatattaaccaagtagtttgggaaccccaagccaaggaagaagaaaaagaccaaaactggtaaaagtcctagagtcccatatacttgaaaccattttactgagaatgtaaaacttttttttctttttttgagatggagtctcgctctgtcacccaggctggagtgcagtggcaaaatctcggctcactgcaacctccacatcccaggttcaagtgattctcctgcctcagcctcccatgtagctgggactacaggcacacaccaccacacccgactaatttttgtatttttagtagagacagagtttcaccatattggccaggctagtcttgaactcctgacctcgtgatccacccgcctcagcctcccaaagtgctggaattacatgcatgagccactgtgcccagcccaaaagattttttagaaattgaaattttagttatggaaattaattcagtgaacaatggtcccctggtcagagtgagggcttacggaggtcaggtgatccatggagtcctggcccaagtttatctcacagttggtctcgtggctccgtggacccatcccatggtggttacttcccaagtgcataattgggatgtagatatttagcaaccagctgacttcacactagttccctgacctgtccagtctaagagtcattatggccaagtggaagcccctggaaagaagaaaacaaaaaagaaaccaaaacttactcagtgcacaggttacatgaatgagtatagctgaagagagaatttttgaattagaagacagatgagtggggattacacagaacgtggcaaggagagtaagttggtagaaccattttacagatgggaaattaaggccagaggggagtgtgttcctgagatccctcctgaggttagtagcatggctcggactagatcctccaaagtctcttaactcctggtctcaggctattttccacaaagagctgggggcctctgtggggtgaagaagacttaggacaccatggggcaccattatgaggccatttcctcctaggagaaaaaaaatctctgggctctgaaaggagtagaattagggtaggaaattaagagaggctaccgaccacctcctccaactaaaattggttcttttggtgccaggaagagacacacctggtgggggagggaaggtggtaatggagggggtgctggtagtgtctcccagatagacccatccaacaagtctcatggagaatgagacggtcactcaggtcatctgcgtattcttggcattcttgctgcctagagagagagtctgatggagctaggtggccaccaagctgtcccactccccaagacagtttggaaacatgggcaccaaggcatgtccctgtctaggggactggggaaatatcccatagcagtgttctcacagtatggggctggccatgaataccccaggagtccaacctccctttgtccagctagaccatggtgtcctatgcctcaggcagggaatgtggtccagtcatcagtggctgggccgtctgccatacatggtgcaagccatggcgttttatgcagaaagtcctgctagcatttgattttctcagaatggagctgtgagcatggcaggcaaccactgtttcctggattcttcaccaagacaccccaagttcctggtctctccccgttatcctcatccctgaccctgtggttctcagagcctccaaacacactcaggctaagcactccatagacaggggaaatttggaaggaacatctagggagctcagaaaagccaatgtccctagccccaggcccacttcaaccttctctctgtcagtcctgcctgcccctggaggctggttacatgaagagtaaccccctgcttgtgtatagccccccagttttgtacaggtttagagacagttcccagcagtaggaacagctgccgaggtgggagagggcttctcccgatagccgggggacttcctctcccaggaacaacagggtggggtagagcaggcttgtcgttgctgagatagagagagggaagggaaacaacaaggaaagtgggggcactgggtccccaaggttcctggcacagcaagcagtgaagttggggcagcctcaggtcatgtagtgggggcaggtgacatctgctttgactgctcctaagagatatgtactcatctcctggattccaaactgcagcctgggacatgttttcttatataaacagcatcaaaagatgtgtgagttcccaggctagcccactgaaccctacctagtgggtgctcattgtcccccagagcccccagaagacaagccgtggctttgtgatgggcctggggccaggaggacctagggatatgttgtgaagagctgagaagactctggaaaaaaggggctctggagccaagcaggagcccgcccaggactcctcacgtgtccaagtcacctagggagagaaacagagcagcccaggttggtccctggaagagagcagcggaggaggggaaaggggagagcccctggggagagctttgaaagtcaagtgctgtttgctcagtgtgtttgcctttccgaggatgtgtttttttttccctccgttagtcagcagtgggagggggagagagacgggtggtagggtgcagggtacctcctggctgcaggcatatgctttgagtgcgtgttcatttacctcctctggacttcctgccttctgttaccagggatcaagacacaggtcattaggcgtgaggtaatggggcatctcttgttctgacccctggcgccagtcttggagtcctgacgctgcagaggagccccagagtcacatttcctgttggggcccatcctgctcatatgcggcaccatcagacttctgggcaggcaagattacctgtgactctgtctgatggtctcgccatcaatatcactgagagtagctgtgtatggagtcccgaactggtacaggataaaacagggggctgaaaagggaatgaatgggcacagtttctctggcatcaaaagtcacatccagaattgatatttcctgttgagtaaaaatagaaatataagttgctcagtggatgttgagtgagccctattcatgtgccccactctgtgccaagcaccaggaaggagggaagggaaaaatgataagatgttctccccgttctccaggagtttatgctccactaagaagtcagagctaacatgcacagaacagtgtggcagcgagagcagaaccgtgtggccagctccatgcttgccgcctagcaagcgtgattgcacttcatcctcataacaacttggtgaggtgtgttgctctgttgtcccattttacagcagagaggactgactctcagtgaattgaaatgtctcagtgaggtcttccacagcaaaaggcgaagcacagagaaggaagtccatgtgggctgggagttcacccagagattcatgtaggggcaatgtgggctgtaccttgcaagatggtgggatttcaatgaggagaagacaaagtgggaggaagctggagacaaggactgtggtctcttcctttagaagtcagttcaatctttttttccttgtggaagcagcataactctaggtggttcctctgtatctgaggacaagctttgtagaggtgacaaaggggtcctaggtcctatcaggcaagcactcgatatgctgccagttcattctgtccattgtgagatacccattccagagcgcttcctctgtgccaggctctacggaggttctggatgttaaagaggaagcaggcatggccctggccctcccagtcttgtgggagattgatcatgcccatgaatagtgaccatgtggtcagagccacagggtcaattccaaatgcccctgtttctcttttgtgttactcacctgactctgggtctttcgtttcttccattcattttttttaaacaaatatttcctgcccaccttctgtgtgccaggcctggggatgcagtgggagaagcctctgtcctcctcagtggaggcgctaactcagaacaggcagtggagaaaaacaacatgacctggagacctggtgccccttccttccccagcatctttgaaattcttttggttgttgttgttttgagatggagtctcactctgttgtcaggctggagtgcagtggcgcgatctcaactcactgcaacctctgcctcccaggttcaagtaattctccctgcctcagcctcccaagtagctgggattacaggtgctctctaccatgcccagtaatattttttgtatttttagtagagacagggtttcgccatgttggccagcctggtctcaaactcctgacctcaggtgatccacctgccttggcctcccaaaatgctgggattacaagcatgagccactgtgcctggcctgaaattcttcaatatctacctgcccttctgccagttggtgcagccacagtgggctgcttatgcatatcctggcctggcttggtggggagcatggctgagggagagccggggcacccatcaattaaggaggtaaagatcagtctgactgagatgcctcctgccacacttcctcagctgccagcaactgacaccattaacctgatttccttccccctctgttgactgcactgactattggactgaatgggaaacagccccgtgcacctcaaaatgcacttcccctcctgcagatgcatcttgcaattaggcccaaactgtgagcctgcatgctcctcccctggccctgcacaggcaacaaagctgaagttaatcagaggtacaaatggctggctatgcctctctgacacgtaacttctggaacatgtatcaatgctttggaaatgaaaagctcctggtattgcaatgccaggctggtgcccataagggccagaaaacattccttgggcaaagccagggggagtgggtgatctgatcccagctcaggtttgttgatttgttgttttgtttgtttcgttttgtatggggcaagggttgagggtatgaaaaacttacactatcatttactaccgtagtccccagaacccagcacaccagcacaaggcctggaacagggataccttttttgaatgaataagtctttttttttttttttttttttttttttgagacagagtttcactcttgttgcccaggctggagtgcagtggcgcgatctcggctcactgcaacctccgcctcctgggttcaagcgattctcctgcctcagcctctcgagtagctaggattacaggtatgcgccaccacgcctggctaatattttggtatttttagtagagatggggtttcaccatgttggccaggctggtctcaaactcctgacctcaggtgatccacccaccttggcctcccagagtgctgggattacaggcgtgagccactgtgcccagccttgaatggataagtcttaagggatatttttggaaaggatattctaaaaaatacccatgtctctacactattgcagaagggctttcagttttgatggcagcctttcaggccagcctacacgcaactaaacttttccataacagcatcacacttacacaagaagaaggttttataatccacttgccattatttaacatagttcttcctccttaactttcaagatctgagcactataatgttcttctttttgtttttgtttttttctaaatcaaattaaggtgagtcacctcaccttgggcctgagttggacagaaatctattcttggctatattccccacccctccaccaccttggaaccttatagaactttatgtggttcaggaaaatgagggcgaggcctcagatcttcaacccatgacagctgtatgcccagctccctgccttcctgtcttacccccagctagggcacaggactgactattgtgcccagagaggtgccagagcctgtaacaaccccagacttcccaggtccagccacatccaccccagagccccaaaagatgatcttcagagagacctttaaaacacaagtagctggtcacttccatccagaccagaacccaagatggctgtgctcttgctgagacatgttggttgtcattgcctccgagcccactttagccctcagctctgtaccagaaatgctgttcctttgggaatcacagccaaagaagagatggagcagttctggaataagaacacaagttcaaactgtcccatatctccccacatcactatctacagttggtctcttcccatggcgatgtccatctgccaccgtggcactggtattgctttgagtgcaggggtctctctttttggcatgttggccctgttactccctgggaactttgagtcttatttggaatgcgtgaagtccctgtgtccggggccagcactgatccacacagctaagtttgcactcatcttccctctcatgtatcatatctggaatggggtctgacacttgatgtgggacctaggaaaaggcctgaagattccccagctataccaatctggagtggttgtcccggttcttactgtactgtcctctgtagggctggcagccatgtgaagaacagaggttcccagcatcatcttcctacacattattacattcacccatctttctgtttctcacttttatctccagcctgggaaaagttctccttatttgtttaaatccttttgtgcttttagatccccttggagcagtagagtaccttgtagaccataagagtggaaaagggtctagttttctccttgtttctaaagatggggtggctgaaaaaactccccttttttgcctacagcttgcctctctgggcctagaagtggttattctgtctccatattggcctttgatttgtgctgagggtcagcttttggctccttcttcctgagacagtggaaacaatgccagctgtgtggcttctgccctgggggctgggggtgaggctttgggtgccactgcctgtgggttgctggcttaaaggacaattctgttcattggtgagagcccaggccattaacacctacgcagtgttattgaaagaagagaggcgggggtggaggggaattagtctatcccagctagagggagataaagagggctagttagttcttggagcagctgctttgaggagaaaatgtatagcttttgacacaacaggaagatccagaaaattatcattgaacatattaaaggttatttctttttcttgcaaaacacacacacacacacacacacacacacacacacgcgaacacacgcagctgatgattctactctcccagccccagccctgaaggggacccagaactccctgcacaaaggctgtccttcaaggggagggtgaaagaagtggaaaatcacattttcattctttagcgtctccatacaacagccagaactgggcagaagctaattatatcagaagcatactccatgttgctgcatcagctttgggatgttcatttttaaatttatttatagcttgtctcattcctcaaaggagttcagggagctacaaaaataaagacaataaaattgaaaaaaattaaattaaaaaaaccatgaccagggaaaatgtgcagtagaatgaagtgtcaattatcacgttttctgactgcaaaatctcccccacggctgatgcaccatcatttactacaacagcccctcttgttggacatttccagtttatttcgtttgggatggtttgttgctgttgctgtggttgtggttttgttttattgaattttgtgttagctgcagctaataccatcttgctgatggctttgcgctgctcttgaatgattactcaggataaatttcctggagacggattataggatcagaaggtctgaacttctgtgtggctctagctacaaagcaccagattgctttccaagagcgttgtagcaatttataatccaacactcagcctattttttggctgggagtcaagccccagaatgtgaaggaggggtcttggcctggagcaggggctgagggatgggtgcacaggacccctccttattggttatttatggggatgggccaggaggagcagaatagaggcccctgccctcccagttgctccttggagtgactgaccccataggggaggggcgaggctacctcacatttagaactatgtagttggtgatggtcaaggtcctaggtctgatgggcatcctcctccctctcctcctcagccagtaatggctgcactatgtcgtatgtcctagatctgggtcccttttgctgtgggaacaccaataatacttacgctgtttcctgccggaaacggtgcaggagggctgtggcatggtagtgggccctggaaaccatctagccttcatgaggaagggcagttaaagcacaggcatgtatgatgttggtattgattaaaagcctcacgggcagagaaattcgccatctgccagggccccagccatacgagggctccagccatacatcctccaggagactgggacctctccaattgcaggagccttgccttccccatcagattaggaattccccgaggatggggacaatgtccttcccacctgcttgagaactcctaaggggcatgtactctgtctccccattgtatctggaacttcctgggagcatagctcctgtctccgtcctcagactgggaatcccctaagggcagaggccatgtccttccacccacttgggattccctgaagttggggaccacatctctgatgtacaatgctttgtatgtactgactgctgcaggattcttggagtaaatgggcagtcaacttcttggactggtattgaccatctggacttcatcagagtgtccaagactttgccattcattagacaggggccatgtgcacaggcagagccctggcctctggcttctggctcctgactcctggtccctctgctttaatttggctaatggcagaaccagactcctttctgggctgccctggaaggggatccttgaatgaaagaggatagatgggaaggtggcagctgacatggttacctcttatgccatgggggggctgctctctctggaaatttaggcctggggtcagggcactgttgagcattttacaccctaggccagaggaggggtgacctgtggagcagggctaagctagtagcccatgaggtatgatgtgtaggcagcacctggggctcacagagcctgttacccatgttatctcctctgaccttggaaagagctggggtgtatgaacaagtatttataagtttacaaaaatcatatgaggaaactgaggcacggggaaggtaaatgacatgccctaggttacacagcttataagtagcagggattctgcccttctgtcacaccaagtcccactgtcttttcttcctggagtccctgtgactgatctaaaggccacatgtttaacagaataaggaggaggcctctgttgcagcaaaccagctaccccacccgcacacagactctaagggacatcctgctttaagctgtccttagttactaatacctcagtgagaatgagtttgaaattttctcaagagccatgggagactaggaagtctctaagcttcatagagagcctggcttggggggacacaggagccaaaggcagaggaagaagtggcagctttgtgcccccagaaacacgtgctcctgacctcacagttggccacagccagccaactctcccatccttctcccaccactttcccgtggggctaacttcaccctgtccacacggagtgacttaacagtttaagccccagagtcgggggccggggtacctgggacaagagtcctgagggaaatggggtgaggaactggaagtgccacagggctagagttctgcccctagcctactggagctgtgccccacaggctggccccactggactgcgctgcctccaagccatcctgggcatctccatgtgtagctgtcacgctcctcccactaaacgcctccctgtgcttcctctgcagttttcatgaacacggccatccccattgcagctgtcctcatagtaagtggatcctttctccatctcttgggggtagggtggagggggagggcgtctgcagtgacaggctgcccagatttggcctttctgcacaggggcctcagaagacaggctccacagccagactgaaaataggatcgaaagtttatagagggtgtggcccctccccaactccagccgaacaggggcctctgcctccaggcctggaagaccggaggcttagtatttagagaaattaaactttcttttaaaaaatagctatccaaatttttaatttttaaagtgaaacatgtgtattgtagaagtgatgggaaatccagaacagaaagctcaaagagaattaaaatcacccataatcccactggtaacatttttaatgtgtttctttccagtctttttttaaggcctatgatatgtcattttctacaaaaataggaatgtgctatgcatgcagttttgcaacctgctcttttaaatttaggaatatgccacacacaattctccatgccactgaatattatgatggtggctttctaaagcaattttgataaaagctgtgtgtgagctgagccatgggggtcaagcagcatgctcctacagaaaggcctgggcccctacgagcctgcagccccctcacccagcctcccatccccatcttctgtgatggctgcagttccttaaaaagatctgcttatttcccccggggccagtgtccctgagctgtgtagagttcacagcctgtcggatacacttgggaattcacttccaatgtgatgtattgagctggttcctggcctggctcctgggggaactgtgggtaacagaggccactgagccagccaggtggctggggcaaagcactgtgcagtttcgtaatcactctgtttacgttatcccgatgaggactggggagatgagcaccccgcctgctgtctgcagagggggccgtgctgacctaacccgagatctcctccctgcttattcccagccaagactgggcaggacagggagtcttggccaggacagggagggagcagcccctgctctccagcttgaagtcctgaacttgttggggacgtttccatgagatgactgtggggatgatgaaggtgtctccaactaaaagatcctcttaggagcctgctccctgacagccctctcatttcccttccagtgctgagcgtttccagtgtgggagggacccacaccctgggccaccctggcctcacttgtgcctctgtccacagactttcgtgggccacgtcagcttcttcaaagaggccgacttctcgccctccgtggcctttgcctccctctccctcttccatatcttggtcacaccgctgttcctgctgtccagtgtggtccgatctaccgtcaaagctctagtgaggtgaggggagggtccgggcgagggcactgggcaggcaggtcctgtgtcagcctcaaggcttgctcgagtgatggccaaaccacagctgtttggtcccggaacacacccccattgctgggccttgctgtagctggtcctggttggtcagagggacattggcctgtatggtttcccagctcgccatccctgagcaaggacttgcttacatacctcccaggagaggggactcactgtcactttcacgacaacttaaaaaaaaaaaaaaaccagtgttgagccaaatgtggaatcctcctaaattctacccactggtcctaacttcaccctccagagccaccaagaatgaggccatcccgtccccacgtggctgccccatggatatcagaaggcatccactgtgtctatctttcccaggccaagtatcccctaccctttccacagcccctgagccctcacagcctcagccagtgaaacagcttcccccaagcgctgggtcctgctctgattggcccacagctcttggaggctcccacttccaggctctagagcctcatggggactctgccactgtcccagaggcattgccctcttgggaatgaaagcctgaaggtagaaggctgaggctttggctgggaaatgccctgtctggagtgagaagatgtccttgggcctctgaagtagctctgcctccttgaaagcaagagcctgtcatgcctctatggagggctggcttgtccttacccatggccagagaaccagtcagtaacaaatgtcctctgtgtcttcagccttgaggaaggtgacacccctgtctcatgggaccctggcaggtactgggaagctggaaggaaggagtagctgttggaatgaagtagctgatagagagggtagcttgcagggggagactctagcatgggttcaaagatggaatggggcataactcagcaaaattatgctctaaggagtatctgaccaggcagtagctggttaaacagggattagctcccatttccacagtcggctgtgctgactcagtttcttgaccagggtgttgtggggtctgaagatcacccctcctcccaccacccactctccagccctatgattctgtgtagaaaccacagatttaagaacgctgcacctgcctgaaaactgttgcactgatcccaaagcgttcatattttcaaacactctggatcccactgtttccaggaatggaacaccagagtagcagaggccttttcagtgaggcagctcaggctctggctgaaggtgggcgcaggacactacctgaagcttcaccccaagagatgagggccagctccactcttcccagtcaccgcctgtgggggagggaggctggacagggcatgaaggcagagcctggtggtctgcccctcccatctaggggtggcgcacagaaagggagactccaggccacagctcacttacaccccagaataaccttgccttgagggtgggatggcttgtctgccccaggcctgttggacatttagcaaaagagaagaaaggggaatacaaacaatcctgagcttcccagaaagctttcacacctccaggatgggagagaatgaactagaagagtgaagcttccagtgcttcctcaggtccacagggaaatctggacaggggagagggtaggaatagccgcctcccccgtgagtaatgacacctcctccagcaggctgttatggggatccgattacataatgctacaaaacagttaacacagtgtctggcatttagtgtatgctcacaaaatactagctattgattctttaccaatcctagtcctaactaaccttaaccctgaccaatccaacaccaaccatccttcagtctaataacccagactaactaacttcaacattaaccctaaaactaaccaatctcacctccaatccagaccccagcctattccagctgactggtcaaccctagcaaaccctggtaacaccaattacctgcccccatgcccactggtctgcccccttcagtgtgggctttgtgggactatacttcaggcctgagatcctgctcagagctctctatcaggctgcgccctctcccctcccctctgcccctggcaggggtgaggggtgtctctgtgcttcccgagcagcgtgcaaaagctaagcgagttcctgtccagtgcagagatccgtgaggagcagtgtgccccccatgagcccacacctcagggcccagccagcaagtaccaggcggtggtgagtgcccggcctccccttgctactcccagcatggtcctctaaggcccaaaacttgggcctgctgtgtcggacttctgccttttttcccaggaagaggggctcccttccctacacagctcccagcccagtgggtcctcacctccaaaccacccccagcccctcagggttgtgaaccgcaagcgtccagcccgggaggattgtcggggcctcaccggcccactgcagagcctggtccccagtgcagatggcgatgctgacaactgctgtgtccaggtgagtcctgctgccccatgcctggccacccagcaccaactcccagagggagctcagcacctggaaagccagaaagctgcatgcttagtcctctgcagaggtcaccctgcctgcctgtacggtccataggagtccagaaaccagggaccaccaagtggggggacccccagccttaggcaagggtcagcatgagaaggccagtctcccactcccctgctctggaagtgatccaggggctggaatcagtgtcttttggctttcatggaggaggggaagccagagactattcactgggaactggctgcctttctgttctctcctgggcggtgggacacgcctaatgaagatcatgggaggctacttcacgtggaccccagatggaatccccacactgtccaacatcaccattcgtatcccccgaggtatggcccagtccacccctccagcatgcccctccccatgtcccactgaataacatagagataaaaagacaaagctgcatttattgagcacctactctctgctcattcttggtgtatgccctgggtatattatagaaggggaaggctacattctagaggcttccgtgtgctgggtgggagtgaagcactaaggacagggtaaaattgccagccttaatgtcaaaccatccattgcagacagtataggtaatgcacaaaaagatcagaagtgggtagccaaggaacgcaagtggaagtgatggggtttctgagaatggacaaaggccctgaggccatgaggcaggaggattttctggcagaggcagccatgagcaaagtatggaggtgggttggaggtgggacccaggatggtgtttcttgggaccacaaggagcctgggctcatactaggagcatgggaaaggagaagcgagtgcttaggaagggtggcggggcaggaaatcagagagggggaaggacctggggagccagaggaggatgttgatttccagaaggaaaggattaaagagggagaggacttgctggggattctaggtaggaagaaagaaaacaggggccccagggttgggtgcatctgtctgtctgtctttctgggtaatggttgttcagactcccccggccccactcacatctgccaccctccctccctgcaggccagctgactatgatcgtggggcaggtgggctgcggcaagtcctcgctccttctagccgcactgggggagatgcagaaggtctcaggggctgtcttctggagcaggtaatacatgtatcctcagggcccagtggaggggaaatctccttttaaccatcctcctcagttgaggatgcacacacatttattggagggcccactctgtgttcagtgaggactcaataaatgctgctaatggatattctcatcatcatcactagtacgtattcacctcttactatgcgcaggttctttgctaagtcctttgcatgcattatttcatttaatttttatgataactaacaaggtccatactgttctcaattctcatttatagaggaaggttaaactatttgtcctaattcacacagctaataagtggcagagctggaattgaaactcagttctgtcagactctgaatcccatggttactcagatgcacggcagtaatttcccagtgtgggaaattgcaacaccaacattggtttccagcttggtcctgagctgcactgacctacacaccataagtgggtgttctgaagatccagatgtaaccaataaatgttggtttctgggcaaagatcactgtcttaattaaagagccagaaccccaggctcagtcaatcacgaatctgttatttatacccacctacttccaagaagcacttgaaactagttgatgaaagattcatgtaaaaatcaaaaccacaatgagataccatctcacacccgttagaatggtgatcgttaaaaagtcaggaaacaacaaatgctggagaggatgtggagaaataggaacgcttttacactgttggtgggagtgtaaattagttcaaccattgtggaagacagtgcggtgattcctcaaggatctagaaccagaaataccatttgacccagcaattccattactgggtatatacccaaaggattataaatcattctactataaagacacatgcagacgtatgtttattgcagcactattcacaatagcaaagacttggaaacaacccaaatgcccatcaatgatagactggataaagaaaatgtggcacatatacaccatggaatactatgcagacataaaaaaggttgagttcgtgtcctttgcagggacatggatgaagctggaaactatcattctcagcaaactcacacaggaacagaaaagcaaataccacatgttctcactcataagtgggagttgaacaatgagaacacatggacacagggaggggaacatcacacactggggcctgtctgggggtggggggcaaggggagggatagcattaggagaaatacttaatgtagatgaagggttgatgggtgcagcaaaccaccatggcatgtgtatacctatgtaacaaacctgcacgttctgcacgtatatcccagaacttgaagtataataaaaaaagatgcatgtaaaataaaaccctttaaaaaggtaagaaaataggaactgagaaatgaagagggtaaaaagatgttcagcaacctgggcagaggacaactacagccatcaacataaaacctggctctgtgccctctggtagccaagggaaaaagggatctctgggctttggagtattcatttaggaataaaagttgcagccaatcagcagaagggcaagctttccctaccaatcatttctaggggaaaattattgaaggtgtcaggtttttcataagcatgagtacagaactgagcagggagaaagactttgggcccaatgtctgaatatcaacatgcacccccgtttcctgcatttccaagatgtccctgaatggtgtatccaaaagatggcaaatttccctcctcagtggggtcgtgggctagcagatgagccccttgggtttcccatcacctcccatcagggactgtgatgtctttgggggcagaggggtctttgcctccattcgccattttatttgggagatttttcaacatagcctgactgggaaggcccaggtattcggtttgagatcatattgccttattccgactgcctctccagcctttggagggaggagcccttttctgctgtccaactgcatgcctgcagcaagaagacaagagtccccagtgcactgtgagctgaagaaagtaaccaatatttattgggtacctcctatgggccatgccctttgctaagtgcattgtcaacatgatctcatcaagcctcctactaagtttaggaggggagtgttgttaccccatttcacagaagcagaaactcaggctcagagaagttgggtgacttactagtcagtgtgtggagcagagactctgcccatgttctttccctcaaacctggtcactgctggggcccccagggcctagtcctaagggttattgtccaagccccatgtagtggtcaggctggatctgggctctcctccaaggcagggcttttccagaaggattgcagggctcagacactggagctgcccctgccttgacctgctcagcatggatgtcaaaacccactctgaacctggtccctttgccctgctttcttctcctcccccaccctcatgccctcatgtggcatcgtgcctgcctcaggagctctccttgtcctatgtagatgaagcaggcatgattggcaggggtctgctctgccctgcctcagtccccacctcttctccaagctgtgccaaccctccgggtctgactgctgcccctctctcttaggaaacctctgccccagcccagggaacacaaggagcctctccaaggcagaggaccctaagcacttcttttttttattattttttattttattttaggttctgagatacatgtgcagagtgtgcaggtttgttacatagctatacatgtgccatggtgctttgctgcacctatcaacctgtcatctttttaagccccacatgtattaggtatttgtcctaatgctctccctcctcttgcctcccaccccccgacaggctcggtatgtgatgttcccctccctgtgtccacgtgttctcattgttcaactcccacttatagtgagcacatgtggtggttggttttctgttcctgcctaagcacttattataggccaggcactgtgcaggcacctcatcatctcagtcagtctgcaccgaactctgtgcagtagatattattatatcctcatttatcagattaggaaactgaggtgaagcaagttgtccaaggccacccagctgttaaatggcagaagtgggatttgcacctaggtgctcaagtgcattggtttgccaccatgtgctcaaagagaaggggcacaagagcctcatgaagaaggcatagctagcctgacagtccaaaggccagcagccgctgtggccatgactcacacacacctgcctcctcccagaactgccacgtgggtcctcacagctctgtccttatcaacacttactctcctttacaggtagcctaggccccagctcccagctctgttcgaggctcgcagaggggcggtagtgaaggggtctcatttctccaggatcctctttgctctctcgcccggtcctggtccagcttccctttcaagcatagtgaagtgcatttgttagcttgcagccaaccctgggaaatcatgagaatttgttcccaagtcaactcattctccagcgtccacagtgacgtattcactcacccagttgagcgcctagtgtatactagaccctgtgacagcaacaggagtgcaaaggtgactaagacgtggcccctgctttttttttttttttttttttttgagacggagtctcgccctgttgcccaggctggagtgcagtggtgcgatctcagctcctcacaagctctgcctcctaggttcaagcgattctcctgcttcagcctcccaagtagctgggactacaggtgtacaccaccatgccggctaattttttgtatttttagtagagacggggtttcactatgttggccagggtaatctcgaactcctgacctcatgatccgcccgcctcagcctcccaaagtgctgggattacaggcatgagccaccacccctggccggccccgcttttaagagaggggagagaagacctgggccttagaagagctcagaggaaccacaattgactctgcagtcaaggagaggaggctcactgcggatgtggtatttgagccttgaaggatgagtgtggtttcatcaagtagaaaaggcagggatgggaaagggaggtggtccaggcaggggtgatggtgtgggcaaagccttgctgatattaaagaacatagttctgtgcacctggaacactggatgcatggggtgcattatgaaagatgggactgaagaagtgaacttggcttagatcccatgtagtaggtctgagaagtaagatttaacccaaaggttgcaaaagaaccatgcttgtgataaaggatgatggattggggaaacagagaaaaagacagacagactgtaggaagggaggtattagcaaataatcataacacagtgtgaggtgtgcattaatattcactcattccaagtattgatcaagaagagaggtaggtactgggttaggaaacagcttgggcaaatgcatggggaaatgagagatgtcaagatgcattctaatggcagcctcttgaagatcttaagttgtttttggttcactcatttcgcaaatgaattcatttagcaaaagcactatggatacagtgcttacctctaggaagtaagttttagcccaaatgctgcagaaggatcatgcttatgacaaaggatgatggactggggagagagaaaaagaaaagacagacagactccaggaaggaaggtcagtctgcagctccttatagtggctaggagaaggagtctaggcagatacgactcaattagcttcatctgctgtttgtctctcaaaatctagacatgtgcactgctctggctggcccacctatcctgggcattgagttaagtgtgggggctgtgtgttgagagtccccctccattactggcaggaactccacacctcagacattgagccccaggtctgcagggagaagacgtgcttgcaaagtgagctaaaagcaaaacagcctctgacctggcaagcattcccaagtctgcacgcctgcagccagaggagagggtgatgccaggctgctgctcagatgcttttcagccatacccaggccaagacctggtgaccaggcagccagaaggagttccaggaggcacaaggcaggaagttgggggattaggaggtgtagaatggagaatgctctggggagatgggtgctttgttggtgcaactattcgtttattcctccagtgaccacgtgagcagtatggctgcacacacaggctctgcagccaagctgcctgggttcacatttggtctctgtgctttggaaaatttcataagctttctctaccagtttcccttattacccatgagattgatgtgaggattaacctagcatgtagtaaatatcctataaatattattattcaatagtgtacttctttgccaggaacaaaattcacctgttcctctttaaatgtcctccagtctgtctcctgggaaagattcttgtgagctccctggggacagggaccatattttgtttgtctcactgtatccgtagtgctttttgctaaacgaattcacttgctaaatgaatgaaccaggaacaacttaagaccttcaagaggctgccattataatgcatcttgacatctctctcctttccacatgcctttgtccgagctgtttcctaacccagtatttcactacccctcttctccatcaatatttggaatgagcaaataccgttagtgcatacctcacatggtattataattatttgctaatgcgtctgtctcctccatgactctgagctccttgagggattattccatgttgtaccccaggtgccccatgcagatgtgtattttgtgcactgttctgtgtaggctacaaaggaaaaggcctagcacctgcccttggggagctcacccacccaggatggacagaggtgtgcagacagagctgcagggtgggcacaaagggtccatctgctgaagtcctgcagatgcagccccgagcttgtccctcacgtcagcagcctggctcctggtctcagagagaactgtgtggttcccaagcattcactttaggaagaatcacttgcccctccctggctctctgcttcaaggaactgtgacaaccttgggatttgcaaactctctctttaatccttaagaggaaaatgttttggtaaaaagtcaagattagcagatacactcgggtgaaattctttccctggaaataaagaatagagccattaatatccacagtagagtgactttaaatgcccccggggggtcagcaggaaccagggccctgaggaaaggatcagcgtggggaagaggctcccacttccctgtgaggagctgcacatgcagtctcactggagctccctgctgcaatgctgttgcctgtggtggttggtgtggatgctgcctgccaagagccctgattccccaggaagagagaaaaaggcttctctcaggacggccctggtcgcatctgcctgtacaattcctggagcctttggggagctgaagtcaggggctcaagtgcccctgggtttcctggaggaggcaggtgtggtgagacagctgacagacaggagaagggatgctctgaggaagtgactgtccagccatgggaaccagatggcccctggctgtagtcctgatgctgccacttgctagctctgtgaccttgagcaggttacttcacctctctgagacagactcactgtctggacaatgagtaaaaccctacctttcctgtctcagagatttggcaatgggacccaatgacatcaattggaaaggatgctgtgggtgaaaggtaacctttcaggacagcgacaagcctgtctgggcaggatgaatgggctgtggagccctgtatatcctagctcactctttgaacctcagtttccacttcttccctttttatttattgccggggtcttaaatgagtgttgggggtatctgattctccctctgcctgtacttttggggccaagcactgagctgaaaagacaattcctcctagttctccaagcctacaacctgccccctaaccagctgtgagctgtaatacattctccagtgtcactgtgaggtttgtgccttcacccccattttatagatcaggaaacagaggctcctccaagtaaaggagcttgcctcagatttcacagccaatgagtggaaaagcctctgggattcaaatgtcagagcccatatttttcctacttctcgcacctgttatcatatgctgcctcttcctttaacctgcagttccctcccttcacctccaccgtctcaatccttcccactctttaaggttcagttcagctatgacttcttctatgaggctctactcattttctcagatttcttcctcctccaaatttcttgtaaaaattatgttttttctctgattctaaaagaatgcacattacattagaaaagatacacaagcatacagaagataaaaaccacctaatatcccatcacccagaagcttccagtttttctttatgcatttgcatatgcatttgtgtttacttttccccaaaagttctccgatactttgtcctacttttcttttgacccttataacttcctgacttcggtacctttctgatttgccctaccagagtgtgagcccctggaaggcagcctctgcaccctgattcaggttgccacacatatgccagctcctagtgggctggagggaaggacatgcggttggggaactggaagactcatgctttcagctgtgtgcttcctccctagagtgcaggcagaggaggaatcgaatcccctcagcactcttgtaaagaccacagcaatgagtgagagatggtgcctgccagacataccattctttacttttcagcttaaaacagatacaaagtttggggaggctcactggaggaggcttggggctacactggaaagagaagaacttggattcacaccccagcttcccctcttcccagctctgtcacatttgcaaactctgagtctcagtatcctcatgtgtaaaatggggatagggtttatagggttgtaaggatgagatgatgagttgtttgcaaacaacttctcacagtgcacagtgaaggtcagcaatgagagccagccccgccctttcttctttccaaatgattaatatatctgttaccagcctccattcattatatagctctgtcatgtgctaagcaccatgggggctgaaaaagatgttcttcctgccttaaaattccactggggatgaacaaattacacgggagctgatcagagaggaaggcagtccattatgagggctaattgagcagtgcagaccatgttgcaaactgagttagggcctggagagcttactgtgtgctggggtcctcaggaatgccacagatgcatcaataaccacctctgctactctggaagtagtcacatcaggaagactccagagataagcttatctgggctgtggccacagagctggaatttgtaagctttaggtttctatgtctcatgttaccagcttgtctataaattgtaaattacagccatctgatggttagggaatatgaagtttggttaagagaatgaaatgagaccacgaagattagagaacaggaaaagaggggactggggactacatacccatcagaatcttcattcagtcctgaccctcagcaggagggggatttcatcaggctcatttccatccttgatttcgtccatcctggttctcctgacaaggggcatttatcagagttatggcatgggaaatcacaggggagtaatgtaccatggcatttaagagtatgaacgttggagtcggagctattttctccgctacttactagctgtgtgactttgggcaagttacttagcctttctctgagcctcactttctttatctgtaaagtgagggcgatcagaataaacctccttcatatggttattttgagctttataaagagacaatactggctgagcacggtggctcactgccagtaatcccagcactttaggaggccaaagctggaggatcgcttgagcccaggagttggagaccagcctgggcaacatagggaatgagactcctgtctctacaaaaaatatacaaaaattagtcaggcatggtggtacgtgcctgtaatcccatctactcaggaggctaaggcaggaggatcgcttgagcccaggaggtggaggttgcagtgagccaagatcacgccattgtactccagcctgggcaacaggagtgaaaccctgtctgagagagagagagagagagaaaatactactatggtgcttataaaagttcaataaattttagctgttgttagtattattaaagtaagatctgtatgaaaataaagcagattttttcccccaaatgttcatgtcagaagtatatatttcattggcaaggggctgcttctggaaggttgagaggtatcctgggggaggggatagagcactggcaaaattggcatcacaattcaagtcacctcactcagtgttttttaagttatcaaaatccacagtatgaaaagcatttgacattacagtccactatatttatgcatttataaacaagagaaaaaatcacgaaaaatacagtaccacgtgcagtacacactgattccatctattctttttttttctttttcctcaaatgcacttgccgcctacttattccagacccaatgattgggtccctatccacagtttggaaaacactataagaaatgattgtgtcctctcactttccctctctgggatttagttttccaactataaaatgctcctgatgcccagccagcctcaccgctgctccgagtcaatgccaggaacgctgatttagcacatgctatttggagggtacccatccaggtgctgtgggagggacagagattgagaagagtgctttctgaccccacagaggccatttggaaaccctgggaatgggtgggagggttggaggtggggattgcttctcccctaagactcagcgtgatggaaaggcaatggggtgggaactaactggtgttggtctgtcccatttgtgtcccagcagccttcctgacagcgagataggagaggaccccaggtacagccttgggactgggtcagaagtgggtctcaacaaagggaaggggtagggtgggggtggaggacttgtgggtgggtaatgctgagtatggattcagggatgtgcagcctacatattttcagagacatggggctaaggcctgcattctcaatgagggcaaaatttggttcttggggacagaaaacacttagacattgcaatgctttgtggctgtccaaagtaccaaacagatgccagtatatctgtggtgctgaaatttcatggtgaatggagtcagaaaatagactagcgattgccagggtctggtgggagagagagggaagggactgccaatgtgtatgggatttgttttggggaagataaaaatgttttggaattagatagtggagatagttgcacaacctggtgaacgtacttttagtttcagaggttttctaaacctctgatttttttttaagtgacaggaaagacagaaaaaagtatatctaaaaaggctctaggggtgatcatggaaaagaaagttaagaaatatgactgtaaggaaaggagatgggtgtccctcaggccaggcagaaaattcagtcttgttgctttatgttcatgtgcaaatctaaaaaatccaagtgatatagattaatgaggctctgagtccctcaaaaccttccctccccttacctctccaaaaaacacttgagataccctagaggtggtatgaagtcaggatgggaaggttggctcagctttgcaaataagtttaagcctctggcctttgctctccaacaccaaagaggcttcactttggtatattttctctgccctttctccctccttgtccccaactgtcagtatgtgatgacaggctcagcctctgtaatggtagtgatcatatttcttgagccaaaaatcagacctcatggcatgtgacaagtttgcatatgtggatgagaacagagtggcagaatatttgacacgggagcagcttgggcagtccagggcacatggcactgcacctgacatccctggcagatcccccacattccgtggttgtcttctgatggggccatatggggctgcagatcatgcctggagccctcgcagctccagggctgcgggttcccagccccagagtgcaggtgctggtgtcagcctgcctggcctggcctggctctgtccagagcactccttgccccagctgtttgtgcagctgtatcagcctcagacctcagcctattcattccaacctgaatgcagaggctgggtctggaggagccacattgcgggcttcatactcctgatctgacaagttttccccccagagcctgcaccaatggcacctctccccattctccctcttaactgggtcctccagggccctcctcacacacccacgtggtcaggcagcagaggcttccccaagatgggcacaccccactctccacacctctctatgcagcatttgtggctacagactgggtccaggggattgtaaaggcatgctcatgttgggttggagggagctcaggatcttcctggaggatatggttcactcccatgagagctcagtatgcctttcctcccctgctgcagcccagagcgggagacagcgaccgacttggatatcaggtactgcgtcctgggaacattgccccccagggtcaactccctccagggtgctctcaggcccaagggagccacatcaccctgctgggcagcccccagaccccagccccagtgttgggggaggccagggagggcccctgtgctccaccaggtggctcgggagctgctgctgtttctgtgcatccatttactcccttcacataagatcatttttatctgggatctctttttcttttttcttcaaaaaccacatcactcaaaatgtggcttccttggctctgcttttaaaaaaaaaaaaaaaagttcttccatttggagaattacctgctgacttcaaagtccagtggcttgagggctacccaaagagggaggaagccagaagttgagtgttcccttggtttggtcacacttttgggctcctccctgactaaggaacaacagactgcagggctggggcaggctgggtgtagggcagggaggggatgaggtcctgctgccccagtcagttgagacccagacctctcaaacctgcctgggggaaggcaaggccaccagaggccacactaagcagatttctaccaactgcacctccccatccccttgcctccatctgagccatcagcttgacaactgcctctgagaacaagcccctgagaatgccttccgcaccccctactcccgccctgctttttccaggaagagaggccccgtggcctatgcttcgcagaaaccatggctgctaaatgccactgtggaggagaacatcatctttgagagtcccttcaacaaacaacggtaaaagcctgtcggagggaggcaggatgtggaggggaggaactgtctctggccagcctgccccagttccgggcccctccatcgatcacccacacccagccatctcactccccaggtgcttacctgcactccagcctctccatatggtgcacctggagaggggccaggtgtgcctgagcattggggcaatccagctcccataggggagagggcaggaatggagggaagggagagagccccgctgccttttctctagctggtgggagggctagctagctctctctgtgagtctccattcgcctggctcctgcactattttccctccaatgataatagttagggctagcatcgactgcgctcttactacataccaggcacagtgccgagctctttgtacacggaatttcctctcatgcttacaacaacctcagtaggtagatattattgttattcccactctacagatgaagaaccaagtttcagaaaggtcccaaggccacccagccagtaagtgaccaagatgggtctcaaatccaaagctgcctaacacctaagtacatgtttgtcaccaacatactctgatgcctccatgaactctggctggcacctgcccaggctaagggctggctggggaagtatgagaggaacaggctgggcaaatatttgaccagccatcatcattactgcctaaaccaaccagcagtggttttccctgcagtgccccaagcacgggttccggctgcagcttttcccactgcacagagatcatgagcgccctttcatcacttactctgcatatttgttcccaaccaattccatccttctagtatttaacctgcccaaacgctgtgtgaagtgctgacctcagctcttttcaagctcacacggtgtttgcttgcacccaagcgggaggcctattaaagccattgctcaccctgggcatagctacccagagactaatgaccctctgcaagtgctcgggccaactctgaccaggctgaccagctgcatcccctgcctctacccacgccaggtacaagatggtcattgaagcctgctctctgcagccagacatcgacatcctgccccatggagaccagacccagattggggaacgggttagtagcagcctctgaggggttttttcaaagccaggacccccaacctaccatgccctgagacactactcaggacaatgggtaactaggaaataggagacattgaaggctgaagagttgcctgcagtaaggtcaaacatgttgttcttgatgatgtcctttgacaggttttcagtcctgcttggagggcaaggtcagcttagtgccctcccaggctggggatcttcttcatttgcaccccaggtatacactgagagcccacacagcactgtgctcagcctggggttgtattgttcctgttcatcctccagatggggtcccctccacaagcttagacgaacaggattctcctgtgactgtcctccttttgtgtgattttaatccctgctgcctctgtctttgtttgtactggtcagatggtccctagcgcctacacaatgaatctttaaagacttggggctcatgctgccctcttctgaatgaattcagtaaacacgtgcaagttccttctctatgcaaggtgagaagcaggcaaagaagtggatagagccaggcctccatcccaaagagctcatagtccagtagggtacaggacagtgtctcctgaatggctgagggcatgatgtgttcctcctctttggtgacagggcatcaacctgtctggtggtcaacgccagcgaatcagtgtggcccgagccctctaccagcacgccaacgttgtcttcttggtgagtgcaagttcccttggggtcctggtctctggctgcctcccaggcctaactgcccacctccacctccccgcaaccccaccatcatccaacaatctccctctccaggagtaaatccctcctgccagagatattgccttatcatcctagtgatagggaaactgaggcaggcaaggatagcacaaatgacccattgcagacttcagatggagctctgcagtagccaatgaggagaggcaagctgtagttataggctgcctgtctgtgggacagcccaacccctcaacacttatgcagcccgactataagaatggctgataacagaatgtgtgctgccacttcccatcttatgcccagtgcagacattgctaattgttcacagcattatttcccatggaacttaactcatcctcagaatccttctcaacacagcactccaggtaaccactagccatcaaacatgagataaaactaggccaggcgcggtggctcacgcctgttattccagcactttgggaggccgaggcaggcggatcacgaggtcgggagatcgagaccatcctggccaacacggtgaaaccccgtctctactaaaaatacaaaaaattagctgggtgcggtggcgggcgcctgtagtcccagctactccggaggctgaggcaggagaatggcgtgaacccgggaggcggagcttgcagcgagccgagatcgcaccactgcactccagcctggggacaaaccgagactttgtctcaaaaaaaaaaaaaaaaaaaagaacgtattcgcaatccttacactacttcatgtcaagttctgttgtgtcaggtgccttgactgacactgaagaattctaagaaccagtccttggcctcaaagatttagaatctgattagggagacagagctcacccagttcaagaggcccagcccggttcaaatccaaactgtgcggcataaactatgagggggccttgtccagggagacaactgtgagggctggagtaatcagggagggcttcctggaggagagcctcaaagggagagtcaattaaacagaaggaaagagggaggccatttgcacagtgagttggaagaaggaagctcaagtctctgattccagctttattccctcccctctccctacaccacacgcacaagcactcctttactaaagacacttcacagtgggaagattcagtctccgttaccgtctgacacacacacagcgttttacaaagcatgggtgcattcgcgatctctcatgagatttaaacaaccctgctagagaaaagtgaagtggacattttatttcagtaaacgtttatgaagcgtctactctgtgccaggcactaaacgtttatgaagcgtctactctgtgccaggcacaggcacaagaagtctcagttcttgggagtgccataatcaggaatggacaaacaatgatcagatctggctttgcgccagtgtcacgggaatagggaggaaggaagggtaggcgtgggggtcaggacaggatgcaggaggaactggtgcttaggtgagcgaaggatgggtgggagttcacaaggcagacaaaaggcagagcagcactccaggcagaggaacagctcaggagaaggcccagacggcaggcttcctgggaacctggaatgcagagtgctgggaaagcacagatgaagcatgagtctagaagggaaagcgagaggttataaagcacctggaacaccagcccacagggtttgactttagagatgatggggagccgttgaaggtccaggagtcaggcagtgaagtgattagatctgtttgagagtgatatctgacaactgccccattttaaatgaggtaaccaaggcccagagaggttgggtgagttgtccaaagccacacagctaactagcttcagtccctagagcagagttgatagaactctaatgggttttatactcattgtcacccctccccaccatgcctttccctaccctctactctcttcctctcccttctgcccaggatgaccccttctcagctctggatatccatctgagtgaccacttaatgcaggccggcatccttgagctgctccgggacgacaagaggacagtggtcttagtgacccacaagctacagtacctgccccatgcagactgggtgagggggaacaagggggtcaggctatagggggcagggctggggaggctgtcaggcatcttggcaggaaccaatccgttgtcttggtagcaactgctgagggccacaaagcataagagaccagcactggatggctttatgcatgctgggcatttcagggagaccctgtacaggccaggggtttggtatcacctagacccacagacactccccatcctggcccgggccccccatggtacactcaaggctggcaccaagaagtctcaggaataatcaagtgctcacttctcaccttctgattcctgcccttttgatgacccatccccgcagtcatggggagtgcccatttggatggaaaagccctcttcccaccctatgaccttcccggggtggatggatgcaccaccccgggaatcatatgggaaatatggaaccaaacaatagcagtagtaatagaaacttcaggctgggcgcaggggctcacacctgtaatcccagcactttgggaggccaggacaagaggatcacttgagcccagaagtttaaggctgctgtgaaccatgatcatgccactgcactccactacagcctgggcgacagagccttgtctctgaaaatttgaaaaaggaaagaaagaaagaaagaaacttcaatattatcagtagagtccaatgttgtgaaacccctcattaactaaatttccatactcttcagtaggtagaaaataattactttttgattcattagaaagcacttaatttttaagatggagatcatgtaattttgaactctaggtcttgcctactcctatataaattctcctctaaacaacagccaaaattgaggccctctttgagcttcaggctggtgccaaatggctctgcttattttccccaaaataaatcttccttccatgtatgatgagaccccctccagtataaagaagacccaaagaaaatcacccaaagaaaaaaggcccaaagataagacccaaagacctaaagatttaaatatatatacagatacagaaggtttgtttctgagtttctgtagtgaccttggcaataccttgtagttcaggacaatcctgaggaacacagaagtgctggcttccttgaggaatcagtgatcaggactctcgagccccttgaaccccagcatagggcgggagggggtgagggcagcaggggtgggtgtctgaattaatgtcaggtctacgtgatggtgtcatcaagtgttccagataaaaagttttattgagccgggcgcggtggctaatgcctgtaatcccagcaccttgggaggccaaggcgggtggattgcttgagcccaggagttcgagaccagcttggggcaacatggtgaaaccctatctctataaaaaaaaaaaaaaaaattagccaggtatggtggcgtgcacctgtggtcccagctactcaggaggctgaggcaggaggatggcttgagccaggaagcagagattgcagtgagctgagatggtgccattgcaccccagcctaggcaacagagtgagaccctgtctcaaaaaaaaaaaaaaaaaaagatttattgattccaaagaggcatggccacacacacttagaccagcaggtgctttgctaagccctgatggaggctgccagacccgccgtcaagaggagctaagggtagtgtacaatgagcccacttagtgtatgacggccgctgccgtgggtggagtccttgtgagtaaccagccagcttgagcaggatgcactaatttgctctgcaaacccagccattgagaaatacgcctcagatgtaccgaactctaggtcctaggagtatgttggttggggtaggttatcaataccagcccacttgcagtggatgagctggtggccatttgtagtgaggaaagggatgtgtcaacctccatcttagactccacaattgagggatgtgaccaccattcctccccagccagcccccaaaccacgtttgttgctgcctttccagatcattgccatgaaggatggcaccatccagagggagggtaccctcaaggacttccagaggtctgaatgccagctctttgagcactggaagaccctcatgaaccgacaggaccaagagctggagaaggtgggtatatccagggatggccaagcagccacccctggatgcaaaggttctgctagaacctgaactcataaaggtcttcctgtccttagtgccccaggaagccccctaaagggcagatgtgggagctgggcatgaactggctcctaccagaggagagacagtacctgtgccaggtgcccagggcagaatcaggtgggcaccttcgccttatcctgaggtagtcagatactatttagttgcaaagtttcagaaaatcaactcaaactggcaaagaaaactaagcaaagaaaacaagagggaattaaggatttattgacccatgaaaccaaaaagtccaggtgtgtcatagctttaagtgtgctggatccaggtagtcagtgtaatcagaaatctgtttctcccatctcttgactctgctcccctcaaattggctcagctcccctcaaattggctccattctcatggtatcagtgagggccaccagcagtcttaggtttacattctcccagctcaacaactctgccagaaaaaaagtgcctctttccccatagttcagcaaaagtcccagggctgagtctcactggtccagtttggtcatgtgcccacccctgaacaaatcactgtggccagcggtgtggaatgtgaggattggcctgtcctgggtcacgtgccactttgggagccagatccacctgaatcacagagactaaaaacaggggaagagtggttccccacagggatatgggggtgctattatctgatgaaggggaaggactaaatcctggcaagatgaatgtgtgtctgtctgcccctccctcaggcagggacaaagtagaaatctgacattggtcatcaccagagtagttaccccttaacttccccttcccccaccaaccatatatcctgaagacattgcccaggccacatctgtcttttaggagactgtcacagagagaaaagccacagagccaccccagggcctatctcgtgccatgtcctcgagggatggccttctgcaggatgaggaagaggaggaaggtacaggcaatgggactgggagtgaaattatggcctgaggtctgatcagccacagagaggctaaggtttggggttctgggtgtggtgcagtagtgtgcctttgattaaatggcttccctctgtgtgcccccgttgtcccctcagtaagtggggataaaatgccctgattcaccctcagagggatggaaatgtgtagccacagagtgggttcttgcggcctgcagaggaggcagctgagagcgaggaggatgacaacctgtcgtccatgctgcaccagcgtgctgagatcccatggcgagcctgcgccaagtacctgtcctccgccggcatcctgctcctgtcgttgctggtcttctcacagctgctcaagcacatggtcctggtggccatcgactactggctggccaagtggaccgacagcgccctgaccctgacccctgcagccaggaactgctccctcagccaggtgtgactggcggcccatggcagaggttgggagtggggatgggggaagggctgagcccatgggcaccctggaactccaaatcactctctgcctgtgaaggagtgcaccctcgaccagactgtctatgccatggtgttcacggtgctctgcagcctgggcattgtgctgtgcctcgtcacgtctgtcactgtggagtggacagggctgaaggtggccaagagactgcaccgcagcctgctaaaccggatcatcctagcccccatgaggtacccgtctcccctggccaggctgggactgtgagcaagtcactgttctctgagccttagtcttcccatctataaaatggggatatacaacctgtcacaagcttgtgggggtgactcaaggagacagtgtgtgtaaaagtgccctccttgtgcaagaagcagggagaaactggcatttactcagccagatactgtgataggcattgtgtgtggttagctcatttaattgttaccatggccctttaaagtgagcgtctgcacatccaagtaaagattgttttctcctccctaagtgggtgtaatttgcccatccccacccatgagttcagctccctgccctcccctcactctctctccctcagccagcctcaggttttgacactgggggaacaggtagctgttctattaataatttcctgtaatgggatggataaaaatctcaaaggccacttgatgtcaaagaggtttaaagttgtccctgcccaattggttggccaacttggcttaaaaacacaacaggcaaacagattttctggccccttgtcgaggctagacctcacaatctaactgcactttttactttccagcctcatgagttttctgtggcccacagatatggcctccaagtttatttacttttactctctatttgccccagctctgtagttctgaaactccctggttggggttgggctgactctgggtcagccagccggcaggctgtccccagggccctgttcctcttggcaggttgtccctctggagaggactctgtgtcccaggaggacagctgctgagtcaggccgagccggcagctgagaaaggcggcagtcgtcagatgggcttgagaaactgaaaggctaacgaaaggccagcgcccctttgggcagctgcaggaattcacggggatacaggccagatgtctacaaattggcagaggatgccagacccatgaatgactccagagacacttacatgaaataattaactatctcattcagtaaacaggaagtaaatcaatggacaaatgagtaactcttcctctggctgcctcttaggttttttgagaccacgccccttgggagcatcctgaacagattttcatctgactgtaacaccatcgaccaggtacagaggaccgtgccacactatccccccttccagagacacctcggacccctgggggcttctcctgtctgaggctgggttccccagatcaggtgatcacagccctctgggaagaagccagtgtccccgatccgattataatgctgcttcagggctggggcctccctcgtgggagcctcacagtaaggctgagggaaaccagatccctttagcttccacctgagatcccactggctttctctagtaaagttccagcatattctgaaccaaggtggctgattgtatggagaatattcattttgattcagcctgtgttctttatttaccattgtaccagatggtgtgaaaacaaaatcttgattcctacctcagggagtttaccttgtagctggagagatgagatacgtgcctataataaagggagagcaaggccgggctcagtggctcactcctgtaaccccagcactttgggaggcggaggcaggcggatcacttgaggccaggtgttcaagaccagcctgatggccaacatgatgaaaccccttctctattaaaaatacaaaaattagccaggtgtggtggcaggtgcctgtaatcccaactacttgggaagctgaggcaggagaatcatttgaacccaaggggcagaggctgccgtgaaccgagattacgctgctgcactcaagtctgggcaacagtgagactcagtctcaaaaaaataaaggatcaaaaaataaagtgagagcaaaacatggcggccagtagcactctaaacacagtcaataccaaaattcacctcactctctccccctcgtctccctcagcacatcccatccacgctggagtgcctgagccgctccaccctgctctgtgtctcagccctggccgtcatctcctatgtcacacctgtgttcctcgtggccctcttgcccctggccatcgtgtgctacttcatccagaagtacttccgggtggcgtccaggtgatggcctcaggggtgaggggtgggaggtgctttgcaatgtgcagtttggtgtacttgctagactcatcgttatgagagtaatagggtcgtgttccctccaaaaaataaaaacaaaaaacagaaatgaaggaaatagaaatatccacatcttattccaccgccctaatataatagtctgccaacacacgcacacactgaggttgacatctgaattatttccttgggcgatatggtcaggactggaattgctaggtcatgataaatgcacattttatgcccttcattcattttgccaacatgcttcccaggagggttgcatcattctagtggtcaggctgattgctgatgcatgaaatcggcgggcacctgattcaagcagtgttatgataacacctcccagcccacgtgagtccagagtgtagctgtaagccttgacttgagggagcctctcacagccattctcatggatcacatttgccctcatgagctttggatccatgcacgcctctttcctcctcaaaattttctaagaatgttctctagggagttctttctgggagtgattctcccagattcatagaaactcatagattcaaaaaattgtaggaaaaaatttaaagaacgtctaggccagtgtttctcaaactgccaattacagcccatcagtgggtcatgaaatcaatatcatggatcacaaccagcatttttttaaaaatgaaaaaaacatcagactgtattcatagagtaaagcaagctttgcttcatgaaacctttgtgttggtcatggaggtgtgtgagtactgatttgtgagataaaatatatttctgactgcaggttgtggtcagaaaggttaagtacctttcccaagtgcacatagttggctagaaactagagttgagatacttattagcaataataaaatttagatgcattttggacacaattacctgccccaaaggatcaacatttgtataaatggctttttgcttggatgatccagaatggcccgacacccacacgaacaacatagctttttgacactcaaaaaattcaaagtgctgcacaagctgttctacaaagttcatttcttctgccagagaaacagcccagtctctgtggcacccagtctgaccctggagatggtttatcagggaaatcaacttcctgcatcccaaactggcctccctggcactgatgtgcttgtcgaggtgcagctttggggagcaggaggcaattctgttgccatggaaacctctggccttaccccgagacgaaacctatcatttcagcacatcactggccagggtctaaagagctccttgatggggtaagcggaagacggggttgaacgctttgagtttggtcttctgttcctttggccagctgtctcaaggttcagattgttcacctgtaaaatggaactagcactgcctgcccagccttagctcagctccaggctgtgcagcagaagtacagggacagatggcgacctggggttgacaatgcccaggacagcagtaattgtgccccacatcaggctgtgtctaagcattgtacataaacgatctcattcagtgctcacaaaagctcaatgggctggtggcattgtcttcccccttcacggggtaagaagctgaggcctagagaggtaaggccattcacccacacagcggtagcaggtggagctaggcttcaggcccaggccgagccctgagcctgccctcttaactgttccactctgttccccgccacagggacctgcagcagctggatgacaccacccagcttccacttctctcacactttgccgaaaccgtagaaggactcaccaccatccgggccttcaggtacgagtccacattcccccaaggtaggagtggaacaggggtggggccagggggcacaggccatgagatttgattctcaggactccacttgggaaggccaaggacacgttctctctcaagctgcctcaggtcccaaggcccaagggatatccaccagcagggacaggccaggtgggctcccactgaatgttctagagaggaaaattccagctctgtagacaagcccaggacctctgtgaggcagagcatgaaaagagacaaagctgggacaagtcttcatgtatcaacgctagaaagggccttaggtgcgggccaccctaagcccttcttttattaaggagcccctgtgtgccaaacactatgctgagtactgtacaggccaatcccactcattctgcactgcaaccctcggtgctgagaatggtcatttccattgcacagacaaggaaactgaggcacagagacgttctataacctctctgtgtaaggtgccacaaagcccagacttgaacctatttgttcatgcaacaaacatttactaagccccgactatgtgctaagccccatgccaggcactaaaaagatgagtcaaataagccgctgccctgcaggcgtttacagcccagactttgagcaggccaggataaatccacgtgacaagtattctgaaaaaagcggattcaagggctgtgggagcatagaagagagacagtccgggaaggtttttgtaccagaggtgtcatcagaactaggactcaaaggaggggcaggagttcaccaggctgaggaattcctgaaaacttcagtgcccctgccatcgtctcactaccctgagtggtgatgttggggtggacaggagcatctgaggttgcctggggaatgagggaagctgttgtttcccactccccaagagtctgtctgatctccagaggcatctctcttccagtcaggcaggccagagacccctgacacacaaagttgggctcttttctcatcttcatccagagagtgataataggttatttttagggtggcacagctgcacgaagtatgacagtaaccatgagacaccaagcactgtgtccaggagtaaccatagggcacaaggaccagccaagggccagagaggcttacatctcctccccccaacccctgaagtccagcttcagccctggagaggtatccaggcccctctgcccaccctggagcacctagggccagtggaaatccacctcttagggatcttgtctaagtaaagaagagcagagcaaagctctgccctggccttggcgctgctccctggacatcccttgcccctggacaagcctatgctgtgtcttccacaaagaagcttgctggggactggattatgactctagagtctcctcccagcctcctcttctcaagcctgaacttctcccgttccttcaacttccaggtccctcgacattactgagcctagcctttgctctaagttttggtgatttccctctctcaattggtgtctcagagggccctggggtagagagatggtgactcttctagagtgggccacagccccttgtgtgcagatcccagcttcctgtaaacagcctcagatcaggccaaacctgtggtcagccagagccactgctacccagtgaggtcttccacaccctactgacacggtgaatgatttttaaatttgaatgaaaggctttttaatcaaccccatacacatttaatgcattggctttaatccagcagcctgttgagagctattagcacttattgattgcccacttactgtatgccaggcaccgtgctaagtgttgtatgtgcattattacatttaatcctcacaaggaccacataacataggtacgaatcgccacattctccagatgcagaagcgagacccagagaggctgggtaatcaatccaaggtcacacagactgcgggggctggcgctgagcttggaacccaggtttgcctgaccttctgggctttcctaagagatcttattttttcccaaaagagtttcaagagtgcccagcactgggctcagtggcgggctcggaggttgttttcgttcatgtaggaactatcacttccccatttttttcataagaaaactgagtctcagtcctgatacacagccaggaagttgtgatgttcaggctccaacctgggtttacatggctccgaggctggggctcttttctagtcctcagacacactgtcgcacgcctgtggcagaagctcccatctcacacttgccgaccctcaactcacacagtcctgagacccacatacgctgagcgcctcacactcctataacacgcacatgccctgatgcacacacattttcaacacgcacttactctacccttcaggcatggtttcacactcactgcagacacgtcaccctcccacacgtctccaccctgggggtgtgcagtagcatgctctctcccacctcagaacctcccttcagtcccctcagacacatgccctctctccacgcagagacaatcaaagctgaactaacaccttccagggtgaaaagcaaatgcccagtaaggtacgtcttgggtgcctccgtgtcccctgagtttggtcctatcaaaccagcgatgatgaggcagcttttctttcgttccttcctccatcatcaaacaagtgctcctgcatctcctctgggccgggcctacgtcagcaaggtctgagggaagcggccaaggagagtgatgacggcagcccaggttgatcagagaaaggaggcaggtccatgcgcagtaactcagggaaaacatgatgaggacctaaggatgagaaagaagcctccagagttccctgtgcagagagattccatcaatttcagagggtcaggggagtgccatgcattcatccaacaaatatttattgatagtgccaggtgctggggtatattggtgaataaaacatcttcatggaatttgcagtctattgagggagatgattataaatagctagagaaatgcatgtacagcagatactgtggagcaaacaggttgcagacaataataggggaaacctactttatagtaaggtagtagccaggaagagcctctctgaggaggcagcatttaaggcaagccctgaaggttgagttgagccagccttatgaagagcaagggcaaaagccttccaggaaaagggaatagtgtgtgcaaaggccctggggtagggaagactttagtattgtcacagagcttttaaaaagctgagtggctgcagcatagtgtgtggggtgtttgtggcaggaattaggttggcaggagggggttcttcatcctataagcagtggaaggtcattaatattcttttttatttgtttttttttttttttttttttttttttttgaggcagagtctcactttgtcacccaggctggagtgcagtgaggtgatcttggctcactgcaacctccacctcccgggttcaagcaattatcctggcttcctcagcctcccaagtagctgggattacaggtgtgcaccaccatgcccagctactaatttttgtattattagtagagacagaattccaccatgttggccaggctggtcttgaactcttgacctcaggtgatccgcccgcctcagcctcccaaagtgctgggattacaggggtgagtcaccgcatccggccggagatcattaatattctaaacagtgggggagaggacacagtttgcgatttagatagattaagccagccactgtgtggagcatggactgtagggagacagcaggtagacgtattcaggaagctgatgcagtagtccaggtgagagtttgtggtgggcaggaagcaggatagagggggagggaggcaaggactcttttagagagagacataagaggacttgccaaggggctgaatgtgaatccaggtgattcctgggtgagaaactgggtaaagggaggtgccccttattataatgggaaagacctagagaaaatggatcttggggtgaaaacaagagtttggaggaggtggggattctggacaggtttgaataagcagaaaggagtggggtggacattccagagagggatagcttacatgaagtggccacggtggcatgtctggggactggaggggccctggagcctccctctgcaggtagggagactcctaggagctatgtggaccaacactgttcccttaggagcttctcatcctccctccaggtatgaggcccggttccagcagaagcttctcgaatacacagactccaacaacattgcttccctcttcctcacagctgccaacagatggctggaagtccgaatggcaagtgctattcccctctaccctggcctctgataggagggtggggccagagcaagagcacacaggtacctggggatgaaagagaggataggataccagatcgtgtggacaccaagccttcctgcttcccccagccctggtggtcctcctagtgtctagcctgtgctccttttccccatatcactgcctggaggcttgtgtatctgaggtgtgtgccagtggcaagaacagttgtggtgaatgtgtatctgcagtgggtcatatgacacccacattgtgtgtgtttgtgggccagctgaggcgtgcatgttaaagggtgtgcaggggctagggggtaggggagcatgagcttgtgggacatgttggctcctggggctccagccttcgcagcccttgtgtgtgtctggtgacgtgtgcatgagttgcagggctggagtggaggcctggctgagctgctctctgccccgaaaaggagtgaggtagaacaggggcctgtggctctaacccctgagcgcccaggtcagctcctctccctccccaggagtacatcggtgcatgtgtggtgctcatcgcagcggtgacctccatctccaactccctgcacagggagctctctgctggcctggtgggcctgggccttacctacgccctaatggtgagcggcagtgggctagggcagaggaggggtcagacaccagcactcccggagcaccttcgtcactggagacatgagacactcccaggccttaccccaatttcatttgcatctgatgccagagggacagtgcgggcaggaaggctgaccagcaggccccagggcccaggccccagacaggtggaggttggggagccacatgactgaccctccctgtgcctccagggagggctgctctgagcaggcagtggatggcagcaaaaggaatctggggccctggcccctctccagccttaagaagagccattctggtggctgaggacagaactaagcgaccatggagtgtgcgccactggcttgctccccacaggtctccaactacctcaactggatggtgaggaacctggcagacatggagctccagctgggggctgtgaagcgcatccatgggctcctgaaaaccgaggcagagagctacgaggggctcctgggtgagaggctcagggagaggggtggggaagagtccaaggaggagtgtgtctgggttgggggccacaagggagcctggggatggggtggcactttcggatactagctgtggcccatgcctggtggctgagcccagcccggcccccagcaccatcgctgatcccaaagaactggccagaccaagggaagatccagatccagaacctgagcgtgcgctacgacagctccctgaagccggtgctgaagcacgtcaatgccctcatcgcccctggacagaaggtcagagcacgggcccaacccaatgctgcaggacaggcgtgagcaggggatggggcatgcacggagctggatggcttcgcagtcacctcgtggccctccagggccgaggcctctcactattcagacatcgcagtctcctgccctgggcctgtgggggcccatctttcctctccttctattgccttcccccagtgctgccctcaggccttgtcttctcactcatccaccaaggagaccgacactctggactcccccagctcacacgggctttgtcagggcctccctctctgcgaatggtcaggggctttccctagggcactgccccgagcttcagggcagggacctgggggcagacagcgaggccacccttgtattgagggtgagcccctgcctatggccctggcccagctctcctctcgtttcccactctgtctctttgtctctgtctcactttgctgtggctgtccatgtcattctctgaccttgggatgtacctctgtccctgcctctctcatccttctatgtcactatctgtctccgtattgtaatttctgttggtacccaagtgccaggaagcaacgggatcagaggtggctccattgtagggcggggcacacagacacatccatgcataccactctcagctgcccctgtgtcctcctgccacacccatgcccatagagacacaccactgccccccagctctccttcagccaagtacccggcacacccagacccacaccaaggcccaggcaaatggacatccatgcctgcacttgcgtgccggtccctgtgtaagccctctctggacccactgcaggaaacaagcccaaacctgtggtgtccaaagagaaactagtcagaaaaccaggccaaaaagataccctgtgacctcccacacctgcacacacacccagagctagcatagaggctattcccagcagccccagagtcccagtggcggtgcctgcttctctctttccagatcgggatctgcggccgcaccggcagtgggaagtcctccttctctcttgccttcttccgcatggtggacacgttcgaaggtgagttgtaaggcgggcaccccacgtgtacccacagccaccagatgaggcctcagccctggcacgtggtcagacatgacaggaggcccagcagtcaccgccttcccctgcaccctcactgggacccatgcagggcacatcatcattgatggcattgacatcgccaaactgccgctgcacaccctgcgctcacgcctctccatcatcctgcaggaccccgtcctcttcagcggcaccatccggtgagccccaccacccctcaggcccacccagccccaggccggctcagttccatcagatctggagcacaaagaggagggggttgggggagaccaggatcccagaggtgtttcctgctcatgcccttctccatcccatcaggcccaggcagcctctggaaggggatcccccacccatgggtctaagatgctgtcccccacccactgccaccacctcggtgcttctcccagccagacctccaactcagtctgctctcgctcactgccctctttgccgcctggggatgcaggcaggaccctgctccctccctactggggctttctgtgccacttccagatttaacctggaccctgagaggaagtgctcagatagcacactgtgggaggccctggaaatcgcccagctgaagctggtggtgaaggcactgccaggaggcctcggtaactactcctggctatgcagctgggttggttgggcactcaaggaccctgtaaggatggcagacagaagcccgtgtctcaggtttgccccaagtttggagtctgaagcctggcaggaccatttagtcctacttctcactatacgggggcccagagaggtcaggtgtcttgccccaggtcacacaactggtcagttcagggtctggctcctcctgcagggtacagcgggtacagtcagggatccttgtgagacagagattgcgagtcccccatgccaagggggcatcttcagccctgccctgccccatccacctgcatgcccagttctgccttaggggaggagaagatggactgggcaatcatagacacgggtcactcatcaaggccaccggtgattggcaaagccttggtatatttgctgcagctcctggagcattgggggtggccaagccttggtttcaatgaatcaccctaccaaggccctacatacacactcagtgcacccctcagtgcacacgccccctcccagaactgcccagggccacagcagcacacacctccaggggtgcccttctcgttgcagtccttgcagacggcctccacattgttgtgtcaggtgcaccagccctgcacacgcctgtgctcttggacacacacccacctatttgcccccatgcacacattttccaacagccccccaagccatcccatctgctccactcacagcacaagattaactcagtcctacttcatctccccgggctgttttcagatgccatcatcacagaaggcggggagaatttcagccagggacagaggcagctgttctgcctggcccgggccttcgtgaggaagaccagcatcttcatcatggacgaggccacggcttccattgacatggccacggttggtcctgggcccctccatgggaccatggtcttggaaagggtttagtgggatgctagggagaaatttgcacgaagtagtcctgaggctcaagttgcctctaacatcaaatgctatgtgttgcagaaaatgaaaagagctggggggaccctgactctgtctagtcttagggaatgttacacacacacacgcacacacaaaaacactatgcaaacacacacataagctgcacacacagacccacacagacttcacactgtcacctatcacaacagcacacacacagccacaaccacaacctacatacacacacagagctgagctcccaacaggctgagtccagtccctgagtgccgggaacctgttcagtcctgtggggtgggggtgggactaggatcggggtcagatgggagctgagccacagacctgggctccacatcccccaagccaggccagaccccatccactgggcaggtgagccaacagctgttgcccccacttggcaggaaaacatcctccaaaaggtggtgatgacagccttcgcagaccgcactgtggtcaccatcgcggtaaggggcccattgatggggtgcagagggacacccagggacaggactggcctgttgtggccgtcatcagtgcacagcccctgggcttgcctggtcccagtaatcaagaaagaaccctgaagcaggcagttcagggcaaggggcctggagggcatgcagggagcctgggttgcaggatttggggtggggggttttgcccctgtgcttccctcagacctcccctctccttctccaggttccaaggcctgcccctgtcccaaggccttatatgttaggctggcgttacttctccataggaagtgggggaggggttgtggagggtctctgagccttgaagcctggaggtggggtagagttgggacttggagaggagagaagggtggtattagcagatggagagcttgtagtcacatccaccccaggaaagtgcagtccccacagtgacaggacattctggccacatgcctcatcctcctcctccaagccgcaggagggccaccctcagctgtggcccccaccgcgggtggtattcccaccatcctgacccgccccctcctgccctgcccagcatcgagtgcacaccatcctgagtgcagacctggtgatcgtcctgaagcggggtgccatccttgagttcgataagccagagaagctgctcagccggaaggacagcgtcttcgcctccttcgtccgtgcagacaagtgacctgccagagcccaagtgccatcccacattcggaccctgcccatacccctgcctgggttttctaactgtaaatcactt

SEQ ID NO: 15330 - DNA, 83858 bp, Homo sapiens
gcgccgccatgcccctggccttctgcggcagcgagaaccactcggccgcctaccgggtggaccagggggtcctcaacaacggctgctttgtggacgcgctcaacgtggtgccgcacgtcttcctactcttcatcaccttccccatcctcttcattggtgagtgcgcgcagcgagccgcggaggaggggacgggagagcagggagggaggaggaggcgctgcgcgccgcaccgctcggcgtccccttccggcccgcgaccgccgtccgcctcgttcccggggtcccctgccctgtgtcctgcccgccggtccccgcactcgcacaccagctcatcccttcactcccccggtgcccccgatcccgcgccaaacacagcggacgtttgtgacccatgggatcaccaagttttgcttctgcagggccaagagctgggatggggaaaagggaaagaggaggtctcagcacgcagtgggaaactggagaggggtcgggcctcaccctccgtggcgcagcttagggagccgggtcacccctcccgcaaggcagcctccctgtcagccgcagctgggcctagggaagagggaagcctgtgctttggagtctgggatggaggcccagctaacccctatgctttcaccgggctgagccgcgcagtggtccgtgatctctgacagtcccaggcccgcgccctgggcgaggagaggcgagagctagggacttggattcccttcccccgccaccccacccgggcatgtgtctccagagcgcaacttctcaggctctgcgcaaagtagctccgactcgccgacgcagcgaccccggcgcccttgcttgcaaagttgggcgccacggccgggacaatcgtgcgtgcctctccactgaggtcccccccatctctctccaagaccttgactcttccagaccagtcaagtctatcaactcatagggtgtcccctgcatccccaaaacgtgttcattcactttaagaaaacaagcaaatcttaaaattcatatacagctttggggaagaaaggaaagattgtcacaaaattagatttacaagaggttgctgcagaagcagagttgctagttattaacaaagacagttagatagaaatagaaataaaacatacaaaatatgtgctcatatgtgcatcaaaaatcaaaaaagaacagcatttacacttctgttctcagccaaacggtttattaacctgatgacttgtcacacaagaagttagtatgtataatggggtaccttggcagggcacagtggcttacatctgtaatctcagcattttggtgggctgtgacaggaagactgcttgagtccaggagttcgagaccagcctgggcaacatagtgagaccccccccgccctttctacaaaaaattaaaaattagctgagcatggtgatgtgcgcctgtagtcccagctactcaggaggctgaggcgggaggatcacttgagcctaggagatcaaggctgtagtgagccgtgatcgtggcactgcactccagcagaggcaacagagcaagaccctgtctcagtaaaaaggtgtggtgggggaggtaccagcataggaccaggctgaatgagttggacgtttagtttgtgtgtaccagccttggggatcctcatgtgtaggtgtcaccctcaccatggacccaatgcccaagcacctttctggggttcatgcaccctcttcctcctccaagtgggcaggcatcctgcctctgactgtctctccctgcaggatggggaagtcagagctccaaggtgcacatccaccacagcacatggcttcatttccctgggcacaacctgcggtggatcctgaccttcatgctgctcttcgtcctggtgtgtgagattgcagagggcatcctgtctgatgggtgagtgactgtctgaggactcaggaaagtgaatctgctccagggtacttcctgaaaggcccaaggagatcctagctcacctatattccacaagcccatgtcttttgttactacatccagcagctcagtgtcttctatgtgccaacctctctgagctgggcactggacgcaagtgagtcccaggccctgccatcagtccaggagagcagagggaacacggacctgcatgccaagtcccagtgaaataatgctagagcctattagaatgccacaactccagtgaaaaatgtctggcctcttctacaacctgccggagttaccttcttggaaaaaaaaaaaaatctaaccatgccacccactcttgcataagacctttccttggttctcagctgttttgaagatgtggtctcagatcctcagcccaccattcaaggtcttcacagtcagccccacctatctctggcctcattccccatgcccaccttccgtttgggcctcacagcacactcctcacacctctgctacagcacagatcacactgtatgttaaagtttatgtctatttgcaaaactgtcttcagagtcagaaaggcctaagagttagaatctgagtcttgttcatctttgtgttcacagtgcaaggcatgtgataaacataaacattattcagtccataaacatttattgggtccttaggagaatgaatgaaaccatgttacaaataagtactctgggaggtgagaggaaggcagaattgggcaagctccatggttgagagggctttggagcggagtctggaagggtgactaggcttcagacacacagaggaggaaggagagagagaactggtggtgcctgagggaagggaaaaggcaccaaagagaaaagcaggtagggctagggagcagcgcaggggctggagcattaaacacaggctggggagcgatggaggctgaggctgggaacccaggttggggcatctcaggaggactgtgaatcccagcctgcatgtttgggtcggatttggtcagcagtttggaacagaagagagatgtcatcagcataacacttttaggtgggaacctgaggtgttcagcgcaggctggaggcagggagaatctagaggtataatagaagcaggacttagcattgactgcagtagtctaggtgagcaataactgcagacagaaatggtgtgtcagcagtcagggacagaagaggagcgggagcagccatctcactaaggaagaatccagtaaccagcaaggatgagagactgccaggagagggagtggtggaggagagggatatttggcttgagtatctgaggtccagcgccccctgagctggaatcagattatacccagactgcactcctgcagtgctgcctggctcctgtagttggatggcaggggataggctccctcatcctccctcccgttccccaccttcccttccccaatgtccctgcatcctggcttcagcagtgatctctaaaatacctgcttgacttggaggcagcagctctgcctgcttattaaagtccctagaccagcaagaagaccagaaggcatactgctacacaagcacgtgacaagtccgcctccacccccacccctacaccccttccaaagtagcacaaatgccacagtgagccctcagatgggaaatactcaccagatggtgacagagaaagacacctccgcccttggagaaggaagacctgggtcttcagtgagcactgctgctgtgtaccagctatgggactttgcacaagtcattcaggctttctgggcctcataagcatttataaacatacgataaaacattttagttgccaacttaaaaatgtgtgagaaagtataaggtgtttcaaaattatttcaaggagtaaagaggcaagagttttgaagatccctgggcagggtgttggctgttcccagtgtggccattcatgactgctctctggccttatgaaacaagcatcatagtccctggcttgcctgcttcatggggctgtggagggtgaaattcgagcatggacagggtgcagagcccggagtggcagagcactgggtagactgtgtattcccagaatgtgggaaactggaatgaatcggtccagggatgccctcctgctggctgtcagcagcccctcctgtgtgtggctgtactgcttcagctcagtgcaaagggccatctcctccccagggcacagatcagctcaagctgagtaattgtcatctggtctttgtgagctcctacccccaggcctgagtgaggggcaggaaaagagcagacaggagaagtcacagacccttgtgatacctccagtctaatccagcctgggttttcagagctgtctggaaatttagggggcaggtgggagggggctgattaaggcagccctgatttgatttagagtgagcctcatttagtgactaattaagccatcttaaacctgtagggcttcccctcttcctttgggtattatttctttctgtgatgttctgaattcagaacaatcaaaacagtataagttagtgaagaagatattttttaataactacaatattttcccagaccaccatacactggataaagcctgtatataaaactttacctaatttcttaactaattgaatgtgtattatttaacaaagcagctaaaaactattctatgaagccatgtcatgaaatatttagttcaattatggttaatcctcatcttatttcgtcttataaaattttaacatttctacctcctattgcaaaaaaaagcatttatatcagcatataataaaacatgtctagatgtcagcttaaaaatgtgtgagagagtagagggtgtttcaaaattatttcaaggagtaaagaggcaagagttttgaagatccccaggaagggtgttggctgtgcccagtgttgccattcatgactgctctctggccttgtctgtcttgtaccttctatattagtttgaagaccttttttggagaatattcactaaagaatatcaatatctaccatttcattaaaaaagaaatgtggagtttgccttttcaagttggtttgatgcttattgatgttttcagggacccagcctcttcccatctttccataccatcctgtgtgtgtgtgtcagcctatcttccccatggtcacaaggtggctgcctagctccgggtattgcttagcatgagcagagagggcatgctgccgacatgcctctcctttatgacagagatcattctttctttgacatctcactggccagaatacgtggaccaacactggcaaaggagtatggaattgcatggctgcttaaaccaatcaccatccattccctggggctgggtatattgctgctggagcaaacctgtggtcctcctggcacagaataaggggaagatactctttggtggacagcccacattgcctctacacttgcacctcagtcccaccagacccactgaggtcacaggatagctctcctcatgtccttcctccttctctgttgaactcttatgtatccttcaaagtccagcctggtgccacctcctctgggaagctgtccttggttgcccaccccctcctttgtgctctctcagtctctgtccatcggcagtatcacttccctagcctgctgactccaacagttagctctgagcatggcagccccctccataccatcagcttctcaagggcagggacccttggcacactggatagaagtagcctggtgggcaacagcagcactgaggcagcaagctgtagcaggccatctgggaatggagtgggtaccacagggctggagcagaaagggcaggctgggcagatctgataaagtggctggaggccacatagcctgggcctttcgttccaggctgagcagagtgggttttgctgtctgcaggagggagctgtggaagggcatgatcacgaccaactaaggtgaccctcctcaccaggcccagggaagactgaggcctggaaggaggctctggctgcctctgggtcttacccccaggccacagtccacccacttagaggcctctgtgagttaaggtggagagactatgagctggtattgactgctccattccccatcccgagagaggagacaaaatcagtgaccttggaaatgcctcttcgtgcctcagtttcctcaccccataaaatgggagactaagagtacccactcgatggggtttaatgaagattaaatgggttaacatatatcgcatgcttagaacagtgcctggcacagagtaaatgctccataaatactgactctcatcagtttgttatcacagcctctggggagggcgccagtgctgacttatgctgttcgtgttaaatggggctgtcactgggtgagttgtggcatacaggcccctgcactgttcaagagaccccagcaacccttgtgcttagggctcagcacatagtaaggcctccagatcatatacccagctctactccatgtactggcagctctgcccagcccataccccaaatacgcccattaactaaagggccctgcagcctataaagtgatgctataaaggttcagtgttcagcctttgaaattcaaggcctgggctgctctattgcagtacttagcatgtccccatcctgtctgtttctctctcccatctcagggtgaccgaatcccaccatctgcacctgtacatgccagccgggatggcgttcatggctgctgtcacctccgtggtctactatcacaacatcgagacttccaacttccccaagctgctaattggtaggtgaggtgtaggagggaggggcagtaccttcattcatttcttcagataatgtttactgaggactcattatgtgccagctattgctctaaacagtagagatttggaatagaaaaagaaaaaaatccctgccttcatggagcttacagtctggtgaaggaggatagacaggcaaagacagtgaataaacaagcaaacaaataggtggtggggatgctatgaagaaaatcaagctgagtaaggggtaggggcaatgacaatgttgctatctacacaggatggtcagggaagggctgtggtaactgtgggcatgcagatatttgggggaaggtattccctgcaaggggagtgacaagtgcaaagtcctctgatagggatagatttggcaaagatgtcactgtgggcaaagccaaatgagcaaggggaagagtgggaggtgagggcaggcgtcaggagaggagcgagcaagagtcccaggctctgggcctgagagcctgggtgaactgtggcatcaataactgatgtgacagaggagggggaggtgggctgtggtggggataaagttttctactgggggcatatcgagtttgagatgtcacagagacagccaactcaagtgtcaagttgggctttcatggggaggtcaggacaggagctacactttcaggaggtgggccttgtagatgacatctaaagcttgagcctggggctggctgccgtggctcacacctgtaaccccagcactttgggaggccgaggtgggcggatcacccgaggtcaggagtttgagaccagcctgaccaacatggagaaacccccacctctactaaaaatagaaaaattagctgggcatggtggcacgcatcggtggtcccaggtactcaggaggctgaggcagtcaaatctcttgaacccaggaggtggagattgtagtgagctgagatcgcgccactgcagtccagcctgggtgacagagcaagactccatctagaaggaaggaaggaaggaaggaaggagggagggagggaagggagggagggaggagggagggagaagaaagcttgagcctggatgaggtcacctggggagagaagagaaaggctctgggaccagagcttgaggtttgctaacatttagagagactcgggaaggactgcccacttagagcttctgagatgttaaatactgcaggactggggtcccaggcagaagcaacaggatgatggttggtgtttactgagcatgtgccatggggcaggctccatgccatgttccttacattcattgtcccacaggctaattcccccagcctccttattggtattgttaatatccccattttccagtgtggaccctgaaactgagaggttaaaaataataacagtaaatactcactttgtacttactgtatgccaggccccatcctacctatgtgatatattaattcatttaatccttgcaacaactctatgaggtaggtaccattattattttccctttacatatcagaaaactgaggctcagaggttaaataactggcactagtctagctcgtcaaggggcacagccgggagtctagcatctgtgcaatctcctaatcatttctgagactgcgtgtctaagggccctcagacttcgtccttggggtaaaggtatcaatccgcaggtctgcctctgtgttggggttcagcctgtgtgtctaaggctggggctgtacatctggcagttagactttgttcacactatgtccttaagtcagactgatttttaggtatcacagcatcgaattgacatttggagtctggcacactctgtgctaagccagtgacatcatggtgttgtcagggagtacagggtgtttcttgcactagtcacaggtctgcctttctgtagaaggtgggatctgagctccattaggattatccaggtgatccccctacccctagcccaggggcccccacatgagtatgaatgggagctgggggaagcaggttgagaggggagatgttaaatacaggcttcagagagccaccctgcttccatttctgaagtagctccttgtctgtagagaacccttcattaaccagggcctggctgaccagtgtcctctggaaacaccctgtctggacatctgaggagttcattttctcattctccagcaaacacataatgttctctctttaaagcacaagttatcacccgtggatggatttgtccttttctaaggaacaaagactaactccctccattccccttgttggagttatctccccttgaaaggacactccacagagccagaaattctagaacagggaaaagtggaggggacgtgcctgtgaactgcagggacagaaggaaatgggtattgggagaatggccagccctccaaggggctgatgtctggcctgggtatggagtcccacagaaaggggacctgtgatgcagcttacattgtcccgtgagggaaccatgatcctggaacccagatgaggccaaggaaatgttctctgaaaaagtcatatttgagctgagaactgaaggaactaactgggagaagggaggaaagagtgcttcaggcagaggaaacagcatgtgcaaaggccccaaggcagaaggaacaaaacacattagaaaattcagaagaagaagagtggcgtgggtgcaaagtggaggggagctggactttgggttttgtttgcttgtgcccaggctggagtgcagtggcaccaccttgggtcactacaacctccgcttcctgggttcaagcggattcttgtgcctcagcctgctgagtagctgggaatacaggcgtgtaccaccacactcagataattttttgtatttttagaagagttgggatttcaccctgttgaccatgctggtcttgaactcctggccttaagtgatcaggtctcaacttcccaaagtgttgggattacagccgtgagccaccgcacccacctggaaggtcataccacagatgtttgcctttatcccaacagcaatgggaagttgtgtgtgtgtgtgtgtgtgtgtgtgtgtgtgtgtgtgtgtgtggtttaacatgtttaacataaaatttatcatcttaactgtttttaagtatagtgttctgtggcattaagtatattcacagccgggcatggtggctcatgcctgtaatcccagcaccttggcaggccaaggcaggtgaattgcttgagctcagaagttcgagaccagcctggccaacatgccaaaaccccgtctctacaaaaaacataaaaattagctgggcgtggtaatgtacacctgtagttccagctacttgggaggctgaggtgggagtatcatgggaggctgaggagagaggatcagttgagcctggaaagtggaggctacagtgagccaagattgtgccactgcactccagccaagattgtgccactgcactccagcctggacaacagagtgagaccctgtctcaaaaaaagaaaaaaaaagtatattcacagtgctgtgtagccatcaccactatccatctccagaactttttcatcttcccaggttgaaactctgtactcattaaatgataactccccatttctccctccttacagcccctgacgaccaccattctactttctatctatgaatttgagcactctaggtacctcatctaagcggcatcatgcactgtctttttttttttttttttttttgagatggagtcttgctctgttgcccaggttggagtgcagtggtgcaatctcggctcaccgcaacctctgcttctctggttcaagcgattctcctgcctcagcctcctgagtaactgggactataggtacctgccaccacgcctggctaatttttgtatttttagtagagacggggtttcaccatattggctaggctggtctcaaactcctgatcttgtgatctgcccacctcggcctcccaaagtgctcggattacaggcgagagccaccttgcctggcctatttgtctttttatgacttgcttatttcactgagcataatgtcctcaaggttcatccatgttgtagcatgtattgaaatttccttcctttttaaggctaatattctactgtatggatatgccacattttgtttatctattcgtctgtcagtgggttgcttccacctcttgactcttgtaaatagcactgctatgaacatgggtgcattgaggggttttcgacataatcataataattgctttatggagaccagcttggaggagaacaagatggggaggaagtgtggaaaccaatgagaaggctctcagggtatagcgggaatacagaggacgcatgatgatgcctggacttaggtggtaccacagggatggagagaagtagatagagtcaagctatttaggacgtgaaatagacagcatttgttaatgggagaggtgtggggcgagggagaagaatagagggagaaggaggagtaatgggagctcaccagcagcccccatgttatgcctctttccttccttttccctcttctctcatcaggcattcagcttttgctgagtacttctgtgtctgacaacaggctgagcactcagcactgcaggacaggactatgcaaaaaacctctgggcctagtcctgggtgcactgctaattccctgtgtgaccttgcacaagacatccaagctctctgagcctcggattccccacctgggcaggaagagtaagtccctgcctaagtcatagggttgtaatgaagagcaaagcagaccatatctgttaagtgttagggacaagacaagcatgaggcatattttcaagtctcggctcctgtaggcagctctcactaagggctaaagggcttctgatgcctgggatagaatctgtccggcagagtggagtggaggcagggggacagccttcagctgtggaattcctccagtcctagagaccagcctgagctgggggacattattccagtcctgaggcatgagagcagaaggccgatgcttctgccctccatcctaatgtcctcctgcagggacccaaggtggatggcatcgatccccccgggtgagctcagccctgggcgcatggtggggcccaacatctcaacctgtttcctaaccctgagccaggcaggacagatcccagatttgtgcccaagagatgctctggcatccatgcccaggcccacatagggatagagggcagggtgaaagtctctctccctcactcgggtcctctggagaggggctctgtgtcatgaagctgaccttatccgcatctggtctaggagggaggagggaaggagctgccagtgctaaaatctcccccaccctcaaagggggacttcacaggttattgctggttttggttgttggaagctgacagtgatttattggcagattgaagtgagtgtgtgtgcgagaatttaggatagaatctactgatagcttctgaggtttaccttccccaggtcttaaatctggagataataaaaatataacagctaatgtccaaagagcacccgctgcgtgtgaggctcactgcactaaatgctttccatatgtttctcacaagaaccttctaggtagcactattatgattcccacttaatggatgaggaaactaagctctagaaggctaagtgactaatccaaggtcacacagctattatgtcacaggctctgagcccaggtgtatctggctgcggagccaccaccactaacccctgtataacgctgcctcacagaactgtggctggctctttccgtatcccccatgcccctgctccatcatcatgctgtggtgggctctgaactgtgaggacagggatccaggctttcaccctctctctgtccctagctgccagtgcacttgggcaaggtcacatcctatttctgggcctcagtttcctcatctgtaaaatgaaaggctggattgaatgacctttaagatttccctcacttggaaattccacaagtaagtcattatagcatggagcttgcatgcatgggctccagcgtcaggccagcccagctctgccagttaatgggtgtgtggccttggatctgttacctaacctttctgagcctcatttcctttgtctgagaaattgggggtgacggcagtgtactttctttgaaaagttatggtgaggaatagataagatcatgtgtttaaagtgcttacttggcacagtgcctgtaacttagttaaattcaataaataaatttcccattcttcccatgatcatttatttttaagggacatttgtctgaccagtttgatttatgagattattggtgtttttcatgaatgttaagacgtacgtgcgtcatcttagagtcatgtactctgatatattcacacgtgcacatccacttactcggaaatgtacacacccaggcacgcttattctgtctccttctctgccacatacttgcacacattatgtgagtgtacacacatgatgcacacacgtctctgcgatcttccatctctcctcggcagccctgctggtgtattggaccctggccttcatcaccaagaccatcaagtttgtcaagttcttggaccacgccatcggcttctcgcagctacgcttctgcctcacagggctgctggtgatcctctatgggatgctgctcctcgtggaggtcaatgtcatcagggtgagggtaagcaggccacctgggccagggtggggtgggaagcagaggctctggcctctgtcctgccctgggttcaggcccccaccctgcttctcagccaaactgagaagggatcagcttgttttacccgcccgtgtaaaggggagtggggccgtggcggaaatttcaggatagacactgcatctggcccacgtgtgctctaccccagggtcccagagggagaggggggtgatgggtgtgttcgctgaggttggcggatgactttccgtagaaagggaagataagcatcaggcactggcctctcctactttctttcttcgggggtgggggactttgctttaatgtattcatatcgtcacgctggtaaatgaatgagtaagtgttttgttttcctttctgtttgctcccgcctccctctctcttcctcaccccagactccaaccttccccttcccctgcccctacctccccaggcagcccagactaatgaactcgtttgtctttcccatgctttgtttttattagtataataccatatgtgtctgtctaaataaatacctattcaggttttttcctctcaacacaagtgaatatgtaggtttcccccacggtatttatcttgtaagaatgggatcatattatgcagttttctgcactgtgcttttctcacccaacaaatatctcttgggactccctccaagccatctgatatggctaattccgttttcttaatggctgcataatattccatcgtatggatgagccataatgtgttcagctatttctctatggatgggcatttactttgttgccaagttcttgccttcatgaataatggtgtgttgaacatacttatatatttatgtattgctgcttttatttctatgggagagagtccaaggaatggcgttgctgggtcaaagggtctgtgtattttaaattttgatcagtgttacatattgccttccagaaagactgtaatctgccagcaatgagtgagaaaaccctttccctgccttccaaccagcagtgagggctacagccctttcgaacttggactgcctgcatttctctgactcttctgcttttagttggtgatctgcagggcacaaagctccttatgtgtccccccatccagtgaccctcacaggaaccctgtgatgcaagcaccatcccctttatagatgaggaaacattttagatgaggcttgtccaaaaacaccttgctagtaagtggaggaggcaggattcaaaaccaggtctgcatgacttggagttctgtgaactgtatatgaaacatggtggtatccttagatctgtggagaagatagcatatgagagattcctgctcctccccaacccaacctaaacccaacccagcctagccatggggggttcaaagtcgacctcaatgagcagttacaaagtcaggatgccctgacattggtggccaagaagtgttggggaatccttttcctggtaataattacaggcgaaagatggccccatctgttagagatcaagtgtggaatatcacaaccccagatccttgctggggcaaggtagggagtggtgagaagttggacttacccatcccccatggcccatgtgccccacagagatacatcttcttcaagacaccgagggaggtgaagcctcccgaggacctgcaagacctgggggtacgcttcctgcagcccttcgtgaatctgctgtccaaaggcacctactggtggatgaacgccttcatcaagactgcccacaagaagcccatcgacttgcgagccatcgggaagctgcccatcgccatgagggccctcaccaactaccaacggctctgcgaggcctttgacgcccaggtggtcagtgggggcacagccacaccatctattcactgccttctggtttagggtcacagagagggacctcaaagggcattaggtcaaaatcctggtgggacaagaggggaaactgaggctggtgaggggaagaagcttgccttaagtcacacagtgaaccagggacaggtgcagggctgaggattcataggacaggcacagttggaatggcccttaccgtttaggtcgtctagtccaaagtccttatccagatggggaaactgaggctctgagaagggaagtgaccccactggactctcacatccctgtgctctttcctctgcagcttactgactataaaggttggagtgttcacttgatttggagcaggggtgttagtggcctgatccttatggtaactctatgagttgagccagacaggaatctccccatatcactgaggagcaaattgaggccctgagaaaggctgtgacctgcccagagctggccacagctggcaggcggcagaggcagtctcctggctcccagtccagtgctccttcacttcctctgccctcgcaccagggcagttgctgaggcagacacggtggcaggtggtaatgagtgagtgtggcacatggccacctcctcattccagtgctgtgctcatcacatagtccctgaccagctgtgtgaccttgagcaatcatctggccttagtttccccatctagaccatgttggtgttgatagggccctcccaactgtgcacttgctgattccatgatctcttcctggagttcacctatttgcagaggatgtgaccactgggtttccccagacaacaggagctaggggcatcctgggaggctaggcccagccgtgaattagccctcaggcactctgacctggccatggtctctctgggcagcggaaggacattcagggcactcaaggtgcccgggccatctggcaggcactcagccatgccttcgggaggcgcctggtcctcagcagcactttccgcatcttggccgacctgctgggcttcgccgggccactgtgcatctttgggatcgtggaccaccttgggaaggagaacgacgtcttccagcccaaggtaggcagccccaggggtagggtaaggcaccctctagatggttttcagttgtttctgagagtgcaacaggccaatgtgtgtgagccatggccacactggagtggctcctcacacatgcgcaaagcccatagcagtatccccaccacagaatactctacatctggtcaacagaaatgccagagggcgagcctatgccccaagggtatcctactctcctctcaccgtcactaccatagtacctctcccggtagttaggtcagtccgaaaactgcaggaagtgcttttgtttgtccagtgtctagagcttctgtgacttggatttgttggctttcagttcatgtcatcttagtaaactctttaaaagttttcaagatctgtcttcttcagtcctgtaaaggctggcacttgagctttctgcaggggcatcttgggagctactgtcagaggagagagaagtgggaaaccctcacgagtggagctttgtctctccccactccaaatttcattcaaagctgcccgtagttttattaatatgttggacttttccattaaaatttcttttttaagaaaagtttccatggcttaaaaaacactggagacttattagactagattatatccaatggccttggcagttgtaacgattctgcaaactgaaatttgttggagctagaaaacctttccccggggttatttgccctgcgtggggccgtagcatccacttcgggggctgggcagactgtgctctgttgtctgtttccttgcagccgtttaggtttaaatggccacaaaatgaaaactttttcacccctaataagtttcagagttttagtttccaagtgaggatgtcattataacattttaaccacagacagtctgaaaataatgcagagaatggggaattagggtttttaataatttatgacaccctttgcgtaacatttgttcatctcatgagctccaaaatcgcagccagcagttaatcctcaggaggtttatgttcatttttctggagacataattagtcagctgaacagttttggccacagatatgagatacgttgagtctgatttatgcagcaaactttcattgaacactgctgtgtgccaggcctgggttgggctgtgggaatatgaaagcaatagttatgatgaggatgattaacaatattaacagccacttactgaccacataatacatacctggctgtgtgcaggagttatccatgtgttatttaatccctaaaactatcctttggcgtgagtatattttgcaacatctttactgtggtatacctcaaatactgtacagtttatgagatgataggtattcttatccccattttacagatgagaaagttgaggctcagaaagtttaagtaattttccccagggtctctcagctagttaataacagaggcagaatttgaacacaagactcactccacagtctgggcatttacagccaggaagctaaattgactattattatcaagccatcacctctggctccaaggattatgaaatccaacagtgaggagagaaatcaaaataaaatacttttatgctatgtgttacatgtgactcttaggaggaatattcagggaattgtgggaaaagatagtgattaacttagccagtggtcatgaacagcttcatagaggaggggatgtttgaaaggggtcttgacggatgagtaggaatttgccaggctgccatgggaagatttcttgctcaaccaagaatgcaaggaccacttttgcttatttaaactttgatggcttttgaagccatatctggctttttgagcctctctactttacctggcccataaaagagaggggaagcggctgcttctcttgtctacaggagtgtcacctttggctctagcctgaccataggctaccccagaatacccccattggcgatcctgaagcagcatggagccagttgttaatatcagggggaaatggcacaggccagagcccttatcagagtgtccacaccacgctcttcttcctgtgtttcccaaaacccttgtgggattctgctaaggagagagctctgaggcaggacgtgccaaagagatggcgaaagcacttagaattttagttcatctgaacgttatcattgccgtttttttctctttgtttatacacaaaccctggggtttattaccgtctcattggaatgctcttgtcccagttacttagcacacaaatccctgagacagatggccctgcctcagtggcagtgggccttatcagatttaatattttttccctgcagcccaaacacaatcagaaaatttccgacacagaaacaagagttgaaagtaaatatagtctccagtgtccgcaacaaagaactctccatcatgtggttgcctgggatgtggcttaattctcatgtgggcttctgagctcagaaaatgggggaaagggatcatttactgagatcatttggttcatctcccagcccccaagccattctaatccagagagaaccgagtgctattctggtctttatgaatgacaaagaaggaagctccctagctacatgttgcagtgtttcacagtctgggagaggaagccgttttttctgcccagcctgaatccatcctgcagcagttggcacagcgaggcacctgtggtttattcatcatcactcttccttcctaagatactcagagttggcaagaaacatgtcatccttggtatccgcaaggacgaacatttctgatgtcctctttagttactgaaagtgtctgtgacttgccagatctttgatgctcctgtcaccccgctgccactccccagggaaagctgggacccaggttgggctctgcctatgatctatagctctttccagcctcctctccaacccaacccctactcccaatctgtcacctcccatggatgccactgatctggctgaaggacaagagaattagattcataatgagctgctggtgtctgaaacctgccagcactgccctgggctatcagttgagccaaaggaagaaggaacagtctgggtttgatcgaagggctaaagcttcaaacagcctctaagtctcagtaggaaaatgtgtaggtttgggagggtgtatgtgtttccgaatgagttcccctaagaactgcttatggttctatatgtgtgttctgtttgtccctgtgtcttttggtgtgtctttttctgcgtgtgtgtgtgcatgtgtgtgtgtctatgcccccgtttggattgccatatttgtggctatcattatgagtgacttaatgagtgtatatgcattggtgtttctgtgactttgtggttttgatgcatgggctggcctcttcataaccatgtccatgcagctggtctggcctagagtacctgccttcaattcactagctccttcttggccatcaagactctgctcaaatgtcacctgctccagggagccttcacctggttgaattagatgccccttatctgtgctcacataacatcctatcaaagcgccctgtttctttccctgacttgatcctctgtcccctattgcctgacctctgtgtgcccagcactcagcccactgcctgacacccaggagatgcacgggaaatggttctgcaaagaaggaataatgcagcaattactatatattgagtgcttacacttactgttttttcacatgcactgttacattgacttctcataacaactctctgaagtcccttcatagcctcaccttacagatgaggaaactgaagctaagagaggttgaggaacttacctaaggacacagtggctaatatatgatgagtcaggacctctaagtccaggctcttaaccaccgtgtcaaacagtcttgtatgaatgggtaggtgtgttggtctctgggtggccaaagataattttattctttacccagggcctcccggggctgggacctacggacaactcaccttttgacacctgccaaaataggaaacaagagtccaagtgatcccctctcctttaagcaccagagaacatgtgaaggggacctttccaatcatacctctggcctggcagagacaatggggctccaaactgtagagtcgggagtgctgggttttagtcctacctctgcagctaactcatttattctcctcagcagtcacattctgcaagcctcaaatgcaaaatgtgtaataacttctgtagaaagtacatgggggcatgaagatcattggcttgattgcttttaaaaaatcggtattgagcactactggggaaatccctggaaacaaacacaattcttccctgagagcttgtgaaaatgcaagactagggcctatgattttccaaagcattttcttccaccaagtgtcaggttgtaggtccttggtcttttctctcttgccttggtacctgcagggtgctgaccagtgctatcatatcccctccccgtttcctaggaccctcttctcggtagactccaacagggcctgccttccttgggcagcatggcaggcctcttggctagtctagtacccacttcttttttttttttttttttttttggatggagcctcactctgtctcccaggctggagtgcactggcgcaatcttagctcactgcaacctctgcctcctgggttcaagcaattctcctggcccagcctcccaagtagctgggattacaggcatgcatcaccatgtccagctatttttttgtatttttagtagaaacagggtttcagcatgttggccaggctggtctcaaactcccgacctcaggtgatctgcctacttcagcctcccaaaatgctggaattacaggcatgacccaccacgcctagtcaggtacccacttcttaactgaaacttagctattccaggttctatcccttttaaaccaactctttgaagagaggtctaataatgacccaatgacttatagctgcagtgagatttttattttaacaggtcacaaaattctcaatccacaaaagtagatttctgaccctaggttattttgttgggggcggagagaggaagtcaaaggttttgcagcctttagagctgcaaaaccagaatttgttgttttgttaaaaatgcacaaataccgacgagtatatttaagtaacacccatagtctaacgaacaaacatgatcagttggcttttccagccctcattctccagcctgtgtgttttctgctcattgtaacacagcgtgtgtgtggcattccatgtttctccagagctttcatgagaatcagtggtcttggatgcatagtgttcccatgagtaccttaattacctaaccattccctgtggttggaaatttatatgggtttttgcattctccttctgctctgaccccaaaataaatgtctgtgttcatacagctattaccttatgtgaaattattttctttgggataaattctcatgatgtgttgttgctttaaaatagtggactccagtctccagagctgcgtctctgcagaggacagtgggacagaagaatcccagggcatgttaaaaaggaccgggtcttcctaaacccacatgcctatatttctgacccagtaccagccaggggggcaagtttccatcccccacaagtcacaaacctgtaactgacactaggatgcttaaggtcaaaggcctggacgaggcctagacagtgggtctggggtagtgtttttgacatcactcaggttcatgttcacatgttgtccccttaccagcatgtgaccttgggccagccactaaccctactgaaactcctttttttcatgtatgaaatggggctaataatggtaccctcctcattagggtattgtgaggatagagttttgcacctgataaatattgtctcctgccccttcctcccctggaaattcaggtctctccctgcagcctaattttaaggcccatttttctgcttccagcccacccctgcccttctaccttcgacctcctccctctgcctctccctctggtgcactggcaaatgggacagagagcctcggtagggccttcctcttagagtcttgcacgcatccctcagtggtctccctgtggctgcttcctgctgccaccaacagatacagacccctgtcgcacagatcatggtagagacagtggtgagcaggaccagacagctccagggagcagtgagggctggcttagagaacctctgttaaactgagaggccaccatcaggaagctctgatccaagatccaggaatccctgactctagggaaaggcctccaatgagagcctgggccctctctgcctgattctgattgtggatgtgccctcaaactccttctcatcactttgttccatccctctttaccctgcagcagctcccacaccctgccaaacaggatgcacagtccagggcagtgtctgagaaagagcagagatctgtcttcatggaaatattgatgtggctctgctggggagcaatggatttatcaagatcaaagttttcctgggagttattgatgcttaatttggaaatagacacactgttgatccctggtatctttagcaacaaagttaaaatgtttgtttttcttcactggttgccatctgagatcttgccggaagtacacaagagaaccttaaatttaacaggaggccctgggagcccatgaggctggcgggcttgggtctgaaatcttttcagtctcttgtaagtgatgagctctcattctctcctgagagctctacggtgccatgttttccactggccttttctgctcagtaattgctacattacaggctgttggtaagttcggaacaagggagctgctgattccatttctgtagcagagaacatgcaccgtgagacttgttgtaccagttcaggttttaggtgctctatttattcttgccccattcagaatgctctcccctgggtctgtggccacaatgctaagagtcatatttatgggcctgcagttgtaattgggccccattctgttcccccaagtggaaagatgaacagggtgtaagcaaccttccctgtagttagaaaaacgtttagttggatttatcagtctgatttttcactcataaacaattgcacaagcctttgcaagcccagagggtcttgtaataatgatggccgtggtccattatggcacagtgatgtgttctacggtggtcattttgctggcaatgacagtcacctctgaacttctctttccaacagacacaatttctcggggtttactttgtctcatcccaagagttccttgccaatgcctacgtcttagctgtgcttctgttccttgccctcctactgcaaaggacatttctgcaagcatcctactatgtggccattgaaactggaattaacttgagaggagcaatacaggtacttggatgattattttttcactttgccataagaaccattattaggaataatgtccatgagtgttattcatcctcatggacactcaagaataattctgctgtaaatttattttttgttgcccattaacgatgttttaaaacagtaaccattgacaaggcagtgtgggatagtggaaaatatcttgggctgaacttgggagacagtgtagctctggctctggttctgccttggactgggtctgaaaatccagctgctcagcccttggcttgaaagtggtagacgtcactaattgatcacagcactctttctgaccaagggtaaatgcaaccttggaatcctctctaagtggctgttccagagttctgctaccagacagtcttctttgggtgtgaaaaaaggaatgtgcttgacatacaaggtctagatagcctctaagacagggtcccctctaagatggggtattggtccatggcctgttaggaactgagccacacatcaggaggtaagcagtgggagcaagcattactacctgagctctgcctcctgtcagatcagcggctacattagactctcataggagtgcgaaccctattgtgaactgtgcaggcaagggtctaggttgtgtgttccttatgagaatctaatgcctgatgatctgaagtggaacagtttcatcctgaaaccatccctctcccccaggtccatggaaaaattgtcttccacgaaaccagtccctggtgccaaaaaggttgaggaccactgctctaagttctatttgaacccttaagtcttgctcactaatgagagtgacctatttggtctgttgggtcacttaagtctaggctcttggtcctgccttctgtgatttccttcttagagtttctggaaagatgatcaaagccagggagtgttcagggcccctctgaagaaggtgatgatgagagttgtccaagtcccagggtcttcactaggattttggttcagctatcagactagagagacatcctgattgagagtagtttaaatgggatagaagtttgtttattcttcagatagagtcagggctgacacaggagctactcaatgatcagagacctggcttcttctgtcatgttgctctgccagccttcttttgtgacttttgtctccatagccatggtgggtattgaaactgccactatatttacatttaaactagccagaagaagggacaagaggagggaacgcattttccttttaaaatggtaatacctgatttgcacataccctctcgcatcccattggtgagaaagtggccaaatggccgtatctagagagtctagaaagagcttggtctttattcttgacagctatatatgcactgctagaaattctctgtgcaaagaggagaatgggcattgggaataactagatgcagctatgcctagtgatgtccatgaagttgtggtaaaatcctgaagctaccttgttctttggaaatgttcctcagaatcattaacattagtcatgtgggagacaggagaagaagctctgcagaaaagggaccgagaggacaaggatatagcttgggctggggacaatgtcagagtccaaactctggctatcttggaatagtctgtgtgaacggtgccctcccaagttgtgcagtgcacaacctgtgcagctatatatggcaaccctgcccatccccagtggtttctcactgggaaagcagagtatttcctcagggatgtcattatgtgacaatagtggaaaaagcccaggaaaatctaagaccttctaagactcatgggggcccagagctgggaggaaccaagctgttgctcagttcagaaaacttctctagaaatcccagcctctcctcacacccctccagtgacaggcagacttgcaccaccacaagcaacagccacttttgtggttgggcagttttgtaattaaatatactaatgtgtgtatgtcataaattacattttccaattatgccaaaagagccaaaaatggttttttaatggttagcatataatcgtttttatcaaattgcttgaatctttcatgttaataagagagattcattactatgccacaaaaagcaaatactggcattaattatagaaacaaattaggggggtggagcgcaatggctcatgactgtaatcccagcgctttgggaggctgaggcgggtggatcacaaggtcagaagtttgagaccagcctgaccaacatagtgaaaccccatctctactaaaaatacaaaaattagccaggcatgttggcgtgcacctgtagtcccagctactcaggaggctgaggcaggagaatcgcttgaacccagcaggtggaggttgcagtgagctgagatcgtgccactatactccagcttgggcgacagagtgagacttcatctcaaaaaaaaaaaaaaaaaaaaagtggctcatgcctgtaatcccagcactttgggaggccaaggcgggtggatcacaaggtcaggagatcgagaccatcctggctaacatggtgaaaccccgtctctactaaaaatacaaaaaaaaattagccaggcatggtggcgggtgcctgtagtcccagctactcgggaggctgaggcaggagaatggcgtgaacccaggaggaggagcttgcagtgagccgagatggcaccaccgcactccagcctgggcgacacagcaagactctgaaaaaaaaaaaaaggaaagaaagaaggaaaggaaaggaaagaaaggaaaggaaaggaaggaaagaaagaaagaaaggaaagagagagagagaaagaaagaaagaaagaaagaaagaaagaaagaaagaaagaaagaaagaaagaaagaaagaaagagaaagaaagaaagaaaaagaaaagaaaggagttagggagaaaaaaaccctttctttctttcttttggagatttccggaaaatgtacccttacggatgagagcctgtgtcttcatgggttagagaataaccacgctttgtgcataaaaagttattaagcacaattcctgaattatacataattactagctgtcagtcagttgtgcatttctgtgtatgctggtcttcacttaataagactttatttcacagatcacttggtgtccctacttcactgaaactaggtgattatcttttgaagtctcatttcacataacctaggaggtatatagatttctttaaaaatgtcattgccattattttaaaccttacccatggtatatataaacttacagaaagacagaataggttcattattttaaaccttgcccatggtgtatattagctcacagaaagacatagaataggttcctgccttaagaaaacctgacccacaaaaaagcctgggtttacacaaaagaggaattaagggcggggagcccaccttacaacagaatgaataatagaattttatccaagagcaggcatcctgaggacatttaagacccggatgcatttttccttgttcaagagcacacatccaaaaattgcagtctttctgcgagtcatgatcactctgcacataaagcgtttaggttcagagctcggggaggccattaccatggctgctctctgtctgccctgtgagggtccttggggtggctgcactctggggatggtgctggggctgactgactcacgcggtcgtgtaacacatcagaccttccaaagtcgaacccttgttttgtttcaaggctcaattatgacaggacttggtctcagagcagatcccctccctaggctggagaaggccactttaaaacagatggcctgccccacttcatcatttttatggctctgatctgtgttctccactggcctctggtaaatcaagaatacaagtggacatgaagatctgctttaaaaaataaagaacagaccgggtgcggtggctcatgcctgtaatctcagcatttggaggccgaggtggatggatctcctgaggtcaggagtttgagaccagcctggccaacatggcaaaaccccatctctgctaaaaatataaaaattagctgggcatggtaggcacgtgcctataattccagctactccggaggctgaggcatgagaattgcttgaacccggaaggtggaggctgcagtgagctgagatcatgccacttcactccagcctgggaagcagagcgagactctgtctctaaataaataagtaaatgaattaaattaaataaaaataaagaaccaattaagtcctgtctacaggaaaaggccttacttgctggagaagtagcttgctgtgctggagtagactagtaagttggaacggtgatacagtaccaccttacagagctgctctagggcaccatggggactgtctgagaagcccctggcacactgtaacaggtggcatctggtgtggtgatgatgatgagaatgatgatgaatgtgaaacactctgctctcatttctagaccaagatttacaataaaattatgcacctgtccacctccaacctgtccatgggagaaatgactgctggacagatctgtaatctggttgccatcgacaccaatcagctcatgtggtttttcttcttgtgcccaaacctctgggctatgccagtacaggtactagatgggctgaggggaagggaggggggcagcaggacacacaaccagaatctgctggtccatggccagtaactaggagcacaccgtcttccactccatgcttgcctgtacctttcacacacttggctataccacaggctgtacctctgggtccctcctgtcccatactctgcaagcactgaccatctctcttaatgaccagagaaggcagtatcattaagactttaaaaatggagccaactttataaactatagaaaaatcaagccaggttcaggggctcacacctgtaatcccagcactttgggaggctgaggcaggaagattacatgagcacaggagttcaagactggcctgggcaacacagtgagaccccttctatgcagaaaaaaaaaagaagaaagaaaagaaaaatcgtacatggaatgcccacagatcttaaaagctatgttgtagcaaaatatttaattacatcaaaaagtgttagtgatgtatttttaagcaaaaagagtaagttacaaatagtatatgttgtatgcttactactaaactggaatatatgttatgtatacatttgtacagattcacacatgaaaaagaattggaaaatcacatagtgggattataagtgatttttattttctttatgtgtttctaaattctctaataagcgtgtataagatttggaaatcaacaacatgatacttttagcctaggcaacaaagtgagaccctgtctgtacaaaaaattagctggaagtggtggctcacaactatagccccagctactcagaggctgaggtgggaagattacctaaagtccaggaggcagaggttgcagtgagctacaatcacaccactgcactccagcctgggcgatagagtgacaccttgtctcaaaaacaaacaaaacctggtgttttttagccagatgtggtggtgcgcccctttagtcccagctacctgggagtctgagatggaaggattgcttgaccccaggagttcaaggctgcagtgagcaatgatcacgcccctgcacttcagcctggacaacagagagactcctgtctcttaaaaaataaaaataaaaacgttaaaacatggtatttttttaaagcaagacaacctttggtgctggctcaggaagaggtacattaccccccaataatcagaggagaatcgtcagcatgattgatctgacctcgggcttcatgtgtcccatctcccacccggagctcttccaccacagagtctgatcctgtcctatgcctgggactaaatcttcaccctggtgttcaggccagaaaccgaaatcccagacccattcccagagggcgggaaggttccaccgggagagcttgatgtagcagaaagtgacttgggtgagacaggctgattcaaatacttaacctctctgagccttggtttctttatctatgaaatggggaggctgcccaccctctggagttgctatggcaattcagttagataatgtaagtaacacagcaggcagagtggcccccagagtcttcacttcgtaaatatcagatccctctaccttgcacatgtttggtatgagtgaggtgttaccaatccagaatccattgcttcttgggataaagattccataaaccttcatctccagtgatttgtattggtcctccttacttgtaaagcttagagtttaaaaatattaaaagaaaaaaaggggagaggctcccacagggacacagctagacaagatgagatgcagggaatctgatgttcttttttatgggaacagtcatatatgccatcccccattaccacctacccatgcccagactgcccccgctccattctgccaagacagatcaatgactataaaagctacaaaagggcctggagatctcatctagtttagttaccaaccaaccttttatgcacaagactttctaagctgggtgtggtggctcatgcctgtagtctcagccactcaaaaggctgaggtaggaggatggcttgagcccaagagttcgagtccagcctgggcaacatagagagacctcatctctaacacaattttttttttgaaacatgaaaaatgaagatttctgaccatgcttctctcattagttaacactttgggctgtgagggtctgatgcagagagacacagcctgggaggatcctaacatgtacacagcattcaaaaggctacaagacactttctgttgtgtccccttgaacaagcagtttgtaagattttgttggccaggcatggtggctcgctcctgtaatcccagcactttgggaggctgaggctgatggttcacctgaggtcaggagttcgagaccagcctgaccaatatggtgaaaccccgtctctactaaaaatacaaaaattagccgggcatgatggcgtgtgcctgtagtctcagctactccggaggctgagacaggagaattgcttgagcccaggaggcggagactgtggtgagctgagatcgtgtcactgcgttccagcctgggtaacagagcgagactcggtctaaaaaaaaaaaaaaaaaagaaatcaggttttgtctactaaacctgctgcacggttaccgttactagtactcacagggtttgttgcacatgcatcgttgctaatagtgctaactaatattaacagcccttgccctatgcctggccctgtcccagcccccctcccttgtataatttaacccttgcactgggggtagagattttcatatctactgatttcttacctttgctcatttatcatggagtgtcctttggttttctgtgtttgtatatacctttaccacttatagatttgaccagcactcaagaaccagtgttactcctgggagttaatacaatcccagccccatggcaaagaaactcatgtggttaggattctgtgtgcagcctggttagccacagggcacgtaaggctttttataatattgacatgagtgcagaagccccattcccgtgtaagccctgagggctcttgtttcataatctttttttggtcacatgcacacagctttattgagatataacccactcatttaaagcatacaaatcagtgggttttagtgtcctatattcacagagctgtgcagccatcatcacaaatgtggaagttttcatttccccaaaaagaaacccgtacccattggcagtcactcctcatcttcgcccccagcccttggccaccgtttatctacacatacttttgaaaggctagtgaaactttctcagaaaaataaatgcttgctcaaacatttgggctataatttcaggggcttcatgggtgcccccctgacatttatcaagaacaccaggttaaggaatttagctataatggaggcctctgtgtttcccagtctcctgggtatcagaggcccagagagggcaggtgccttaccctgggccacgcagtgaaccagtggcagcaccatactcacacatctcctttctgcggttccccagtgacagagttctcaggaagctttttcatttattttctgagaggagggtaggccatcttgtattgatctccaactatatgccagccacaattctaggtgcttatcataaaggttcatttaatcttcacaatagtcctgcagagtggacagagtccttcagagtgggcattataatcaccattttaaagatggagaagctgaaaaccagagaggttaagtaactcacccaagactgcacagcaaaaggctggggctttgaaactcagggccacagactccaaagactatgtcctccccactatgctagatttttttcctaacctgtgaataggagacaaaatagtccttttatttctcacagttgctttgcacactcagaatccatgatttcttctgcatgagggccattcagacctgtgcagaagagagtaatggaccaaggagtcttgggagcacctaggaggaggggatgggggagcatgaggaggagccagggaacagcagcagctgcagcaccagctcccaccccagcctctgccagtctcttggaggtggtgtgggtgcagacaccggctcacaaggtgccctgttagtgagcttggggtgccatgggagccttcttgttgtcaggcccaacccaagctggctgaagaacaccctgatggcctccatttgagcacaactaatgaaggactggatgccagagataagtccaggagggtgatgctgcagggcaggccagggaagagggtacttcatctctatcatggtcctctgcccatccatgccagcatctaacacctgttaaacactgggaggcaggtggtgaaggggccacttcccagcctctaagatacctcctaagccaggaggcattctgtgattaaattacagggcctcccacttactcctttatccttgaggcggtgctggaagcttaatgccaatctggtgtagggctctgggactacaggaccaaggcaagcagtcctttctctctctctctctctttttagctaaggaagccagcacatctgttctttgagaaaaagccctgtatttagaggtgtctgcctttgaaggcaacctgagaaactgtcatcttggcgctttggggactggccatttacacttctcataaatattcagaagtaggcagtcatttacataaagctaaatgcagaaggaattctcttttcagggaatacctggcagattcattaaaaaaattaaagaaaccaagagcataagaatgaaaagcgaattctcggaccccaggctggttttttctggcatgggtgcagtaactttgcctctttgctcagttatcacttttttccaatgacagtaaccataagccctgagagccagcaaatagaacaaaaggtgctgtcacaaacattgtgcaatctcatctctgagatttccatctggaaaatagactggagagagttaaggcttcaaccagccttgcagataaatgcagttagttaccagcccagcaaccctctgcttgcatgagagcccattatgctaacctccttttgaaattgctttgtttctcctccttccctgcactccactccccaagataatttggaaacctgggcaccaaggcttgtcccactctaggggactggggaaacagggattttgccagcacctcctggcagggcaaccatcaggtcaaagggacctgacccatgaccccttcctcagatcattgtgggtgtgattctcctctactacatactcggagtcagtgccttaattggagcagctgtcatcattctactggctcctgtccagtacttcgtggccaccaagctgtctcaggcccagcggagcacactggtgagtgcccaaaggtgtgtgtgttttgtccctcttcccctccttccctcgacagcagcaggtctcctcccacacacccacactgtcattgactttgactttgactttgagtaggccacttcacctgtccaggcctcagcttctttgtctgggaaatggagtcaatgggggaggaggctgcctcccggtgaggacaggaggcgggcatggcagtgacagtattgacactcaggccttcctctcgggtgggagacggagcagaagcctctcccctctgactcggggacccctgcaggagtattccaatgagcggctgaagcagaccaacgagatgctccgcggcatcaagctgctgaagctgtacgcctgggagaacatcttccgcacgcgggtggagacgacccgcaggaaggagatgaccagcctcagggcctttgccatctatacctccatctccagtgagttcaccccacacagccagccctgggtgctgctgcgtacatgcaaggagagggtgtcagagctcgggtaagagggggtgcagggacagaagcaggaggccttgagattatccgactcagtaggggagcctcaaactggctctgatagctaagctcccagaaatcaaagtactcttcattcatttatccaacaaacatgcatggaaagcctgctatgtgctggacactgtgctggccctcaggatacagtgatgaggaagagagatgaagtttcattcctcatggaactgatatgttattgacagacagcagcaagtaagtaaatgaccacagttttgaactctcctaagaatgaagactttttagtaagtcagactgagctgtcattgccctggggaagctacaagaaagcttccatccacttggggctatgcaaaagaaaaagactagttatccttaaatatcagaagcccaggctgaaggtactcacaggtgtagggactgaatttatattaaccaagtagtttgggaaccccaagccaaggaagaagaaaaagaccaaaactggtaaaagtcctagagtcccatatacttgaaaccattttactgagaatgtaaaacttttttttctttttttgagatggagtctcgctctgtcacccaggctggagtgcagtggcaaaatctcggctcactgcaacctccacatcccaggttcaagtgattctcctgcctcagcctcccatgtagctgggactacaggcacacaccaccacacccgactaatttttgtatttttagtagagacagagtttcaccatattggccaggctagtcttgaactcctgacctcgtgatccacccgcctcagcctcccaaagtgctggaattacatgcatgagccactgtgcccagcccaaaagattttttagaaattgaaattttagttatggaaattaattcagtgaacaatggtcccctggtcagagtgagggcttacggaggtcaggtgatccatggagtcctggcccaagtttatctcacagttggtctcgtggctccgtggacccatcccatggtggttacttcccaagtgcataattgggatgtagatatttagcaaccagctgacttcacactagttccctgacctgtccagtctaagagtcattatggccaagtggaagcccctggaaagaagaaaacaaaaaagaaaccaaaacttactcagtgcacaggttacatgaatgagtatagctgaagagagaatttttgaattagaagacagatgagtggggattacacagaacgtggcaaggagagtaagttggtagaaccattttacagatgggaaattaaggccagaggggagtgtgttcctgagatccctcctgaggttagtagcatggctcggactagatcctccaaagtctcttaactcctggtctcaggctattttccacaaagagctgggggcctctgtggggtgaagaagacttaggacaccatggggcaccattatgaggccatttcctcctaggagaaaaaaaatctctgggctctgaaaggagtagaattagggtaggaaattaagagaggctaccgaccacctcctccaactaaaattggttcttttggtgccaggaagagacacacctggtgggggagggaaggtggtaatggagggggtgctggtagtgtctcccagatagacccatccaacaagtctcatggagaatgagacggtcactcaggtcatctgcgtattcttggcattcttgctgcctagagagagagtctgatggagctaggtggccaccaagctgtcccactccccaagacagtttggaaacatgggcaccaaggcatgtccctgtctaggggactggggaaatatcccatagcagtgttctcacagtatggggctggccatgaataccccaggagtccaacctccctttgtccagctagaccatggtgtcctatgcctcaggcagggaatgtggtccagtcatcagtggctgggccgtctgccatacatggtgcaagccatggcgttttatgcagaaagtcctgctagcatttgattttctcagaatggagctgtgagcatggcaggcaaccactgtttcctggattcttcaccaagacaccccaagttcctggtctctccccgttatcctcatccctgaccctgtggttctcagagcctccaaacacactcaggctaagcactccatagacaggggaaatttggaaggaacatctagggagctcagaaaagccaatgtccctagccccaggcccacttcaaccttctctctgtcagtcctgcctgcccctggaggctggttacatgaagagtaaccccctgcttgtgtatagccccccagttttgtacaggtttagagacagttcccagcagtaggaacagctgccgaggtgggagagggcttctcccgatagccgggggacttcctctcccaggaacaacagggtggggtagagcaggcttgtcgttgctgagatagagagagggaagggaaacaacaaggaaagtgggggcactgggtccccaaggttcctggcacagcaagcagtgaagttggggcagcctcaggtcatgtagtgggggcaggtgacatctgctttgactgctcctaagagatatgtactcatctcctggattccaaactgcagcctgggacatgttttcttatataaacagcatcaaaagatgtgtgagttcccaggctagcccactgaaccctacctagtgggtgctcattgtcccccagagcccccagaagacaagccgtggctttgtgatgggcctggggccaggaggacctagggatatgttgtgaagagctgagaagactctggaaaaaaggggctctggagccaagcaggagcccgcccaggactcctcacgtgtccaagtcacctagggagagaaacagagcagcccaggttggtccctggaagagagcagcggaggaggggaaaggggagagcccctggggagagctttgaaagtcaagtgctgtttgctcagtgtgtttgcctttccgaggatgtgtttttttttccctccgttagtcagcagtgggagggggagagagacgggtggtagggtgcagggtacctcctggctgcaggcatatgctttgagtgcgtgttcatttacctcctctggacttcctgccttctgttaccagggatcaagacacaggtcattaggcgtgaggtaatggggcatctcttgttctgacccctggcgccagtcttggagtcctgacgctgcagaggagccccagagtcacatttcctgttggggcccatcctgctcatatgcggcaccatcagacttctgggcaggcaagattacctgtgactctgtctgatggtctcgccatcaatatcactgagagtagctgtgtatggagtcccgaactggtacaggataaaacagggggctgaaaagggaatgaatgggcacagtttctctggcatcaaaagtcacatccagaattgatatttcctgttgagtaaaaatagaaatataagttgctcagtggatgttgagtgagccctattcatgtgccccactctgtgccaagcaccaggaaggagggaagggaaaaatgataagatgttctccccgttctccaggagtttatgctccactaagaagtcagagctaacatgcacagaacagtgtggcagcgagagcagaaccgtgtggccagctccatgcttgccgcctagcaagcgtgattgcacttcatcctcataacaacttggtgaggtgtgttgctctgttgtcccattttacagcagagaggactgactctcagtgaattgaaatgtctcagtgaggtcttccacagcaaaaggcgaagcacagagaaggaagtccatgtgggctgggagttcacccagagattcatgtaggggcaatgtgggctgtaccttgcaagatggtgggatttcaatgaggagaagacaaagtgggaggaagctggagacaaggactgtggtctcttcctttagaagtcagttcaatctttttttccttgtggaagcagcataactctaggtggttcctctgtatctgaggacaagctttgtagaggtgacaaaggggtcctaggtcctatcaggcaagcactcgatatgctgccagttcattctgtccattgtgagatacccattccagagcgcttcctctgtgccaggctctacggaggttctggatgttaaagaggaagcaggcatggccctggccctcccagtcttgtgggagattgatcatgcccatgaatagtgaccatgtggtcagagccacagggtcaattccaaatgcccctgtttctcttttgtgttactcacctgactctgggtctttcgtttcttccattcattttttttaaacaaatatttcctgcccaccttctgtgtgccaggcctggggatgcagtgggagaagcctctgtcctcctcagtggaggcgctaactcagaacaggcagtggagaaaaacaacatgacctggagacctggtgccccttccttccccagcatctttgaaattcttttggttgttgttgttttgagatggagtctcactctgttgtcaggctggagtgcagtggcgcgatctcaactcactgcaacctctgcctcccaggttcaagtaattctccctgcctcagcctcccaagtagctgggattacaggtgctctctaccatgcccagtaatattttttgtatttttagtagagacagggtttcgccatgttggccagcctggtctcaaactcctgacctcaggtgatccacctgccttggcctcccaaaatgctgggattacaagcatgagccactgtgcctggcctgaaattcttcaatatctacctgcccttctgccagttggtgcagccacagtgggctgcttatgcatatcctggcctggcttggtggggagcatggctgagggagagccggggcacccatcaattaaggaggtaaagatcagtctgactgagatgcctcctgccacacttcctcagctgccagcaactgacaccattaacctgatttccttccccctctgttgactgcactgactattggactgaatgggaaacagccccgtgcacctcaaaatgcacttcccctcctgcagatgcatcttgcaattaggcccaaactgtgagcctgcatgctcctcccctggccctgcacaggcaacaaagctgaagttaatcagaggtacaaatggctggctatgcctctctgacacgtaacttctggaacatgtatcaatgctttggaaatgaaaagctcctggtattgcaatgccaggctggtgcccataagggccagaaaacattccttgggcaaagccagggggagtgggtgatctgatcccagctcaggtttgttgatttgttgttttgtttgtttcgttttgtatggggcaagggttgagggtatgaaaaacttacactatcatttactaccgtagtccccagaacccagcacaccagcacaaggcctggaacagggataccttttttgaatgaataagtctttttttttttttttttttttttttttgagacagagtttcactcttgttgcccaggctggagtgcagtggcgcgatctcggctcactgcaacctccgcctcctgggttcaagcgattctcctgcctcagcctctcgagtagctaggattacaggtatgcgccaccacgcctggctaatattttggtatttttagtagagatggggtttcaccatgttggccaggctggtctcaaactcctgacctcaggtgatccacccaccttggcctcccagagtgctgggattacaggcgtgagccactgtgcccagccttgaatggataagtcttaagggatatttttggaaaggatattctaaaaaatacccatgtctctacactattgcagaagggctttcagttttgatggcagcctttcaggccagcctacacgcaactaaacttttccataacagcatcacacttacacaagaagaaggttttataatccacttgccattatttaacatagttcttcctccttaactttcaagatctgagcactataatgttcttctttttgtttttgtttttttctaaatcaaattaaggtgagtcacctcaccttgggcctgagttggacagaaatctattcttggctatattccccacccctccaccaccttggaaccttatagaactttatgtggttcaggaaaatgagggcgaggcctcagatcttcaacccatgacagctgtatgcccagctccctgccttcctgtcttacccccagctagggcacaggactgactattgtgcccagagaggtgccagagcctgtaacaaccccagacttcccaggtccagccacatccaccccagagccccaaaagatgatcttcagagagacctttaaaacacaagtagctggtcacttccatccagaccagaacccaagatggctgtgctcttgctgagacatgttggttgtcattgcctccgagcccactttagccctcagctctgtaccagaaatgctgttcctttgggaatcacagccaaagaagagatggagcagttctggaataagaacacaagttcaaactgtcccatatctccccacatcactatctacagttggtctcttcccatggcgatgtccatctgccaccgtggcactggtattgctttgagtgcaggggtctctctttttggcatgttggccctgttactccctgggaactttgagtcttatttggaatgcgtgaagtccctgtgtccggggccagcactgatccacacagctaagtttgcactcatcttccctctcatgtatcatatctggaatggggtctgacacttgatgtgggacctaggaaaaggcctgaagattccccagctataccaatctggagtggttgtcccggttcttactgtactgtcctctgtagggctggcagccatgtgaagaacagaggttcccagcatcatcttcctacacattattacattcacccatctttctgtttctcacttttatctccagcctgggaaaagttctccttatttgtttaaatccttttgtgcttttagatccccttggagcagtagagtaccttgtagaccataagagtggaaaagggtctagttttctccttgtttctaaagatggggtggctgaaaaaactccccttttttgcctacagcttgcctctctgggcctagaagtggttattctgtctccatattggcctttgatttgtgctgagggtcagcttttggctccttcttcctgagacagtggaaacaatgccagctgtgtggcttctgccctgggggctgggggtgaggctttgggtgccactgcctgtgggttgctggcttaaaggacaattctgttcattggtgagagcccaggccattaacacctacgcagtgttattgaaagaagagaggcgggggtggaggggaattagtctatcccagctagagggagataaagagggctagttagttcttggagcagctgctttgaggagaaaatgtatagcttttgacacaacaggaagatccagaaaattatcattgaacatattaaaggttatttctttttcttgcaaaacacacacacacacacacacacacacacacacacgcgaacacacgcagctgatgattctactctcccagccccagccctgaaggggacccagaactccctgcacaaaggctgtccttcaaggggagggtgaaagaagtggaaaatcacattttcattctttagcgtctccatacaacagccagaactgggcagaagctaattatatcagaagcatactccatgttgctgcatcagctttgggatgttcatttttaaatttatttatagcttgtctcattcctcaaaggagttcagggagctacaaaaataaagacaataaaattgaaaaaaattaaattaaaaaaaccatgaccagggaaaatgtgcagtagaatgaagtgtcaattatcacgttttctgactgcaaaatctcccccacggctgatgcaccatcatttactacaacagcccctcttgttggacatttccagtttatttcgtttgggatggtttgttgctgttgctgtggttgtggttttgttttattgaattttgtgttagctgcagctaataccatcttgctgatggctttgcgctgctcttgaatgattactcaggataaatttcctggagacggattataggatcagaaggtctgaacttctgtgtggctctagctacaaagcaccagattgctttccaagagcgttgtagcaatttataatccaacactcagcctattttttggctgggagtcaagccccagaatgtgaaggaggggtcttggcctggagcaggggctgagggatgggtgcacaggacccctccttattggttatttatggggatgggccaggaggagcagaatagaggcccctgccctcccagttgctccttggagtgactgaccccataggggaggggcgaggctacctcacatttagaactatgtagttggtgatggtcaaggtcctaggtctgatgggcatcctcctccctctcctcctcagccagtaatggctgcactatgtcgtatgtcctagatctgggtcccttttgctgtgggaacaccaataatacttacgctgtttcctgccggaaacggtgcaggagggctgtggcatggtagtgggccctggaaaccatctagccttcatgaggaagggcagttaaagcacaggcatgtatgatgttggtattgattaaaagcctcacgggcagagaaattcgccatctgccagggccccagccatacgagggctccagccatacatcctccaggagactgggacctctccaattgcaggagccttgccttccccatcagattaggaattccccgaggatggggacaatgtccttcccacctgcttgagaactcctaaggggcatgtactctgtctccccattgtatctggaacttcctgggagcatagctcctgtctccgtcctcagactgggaatcccctaagggcagaggccatgtccttccacccacttgggattccctgaagttggggaccacatctctgatgtacaatgctttgtatgtactgactgctgcaggattcttggagtaaatgggcagtcaacttcttggactggtattgaccatctggacttcatcagagtgtccaagactttgccattcattagacaggggccatgtgcacaggcagagccctggcctctggcttctggctcctgactcctggtccctctgctttaatttggctaatggcagaaccagactcctttctgggctgccctggaaggggatccttgaatgaaagaggatagatgggaaggtggcagctgacatggttacctcttatgccatgggggggctgctctctctggaaatttaggcctggggtcagggcactgttgagcattttacaccctaggccagaggaggggtgacctgtggagcagggctaagctagtagcccatgaggtatgatgtgtaggcagcacctggggctcacagagcctgttacccatgttatctcctctgaccttggaaagagctggggtgtatgaacaagtatttataagtttacaaaaatcatatgaggaaactgaggcacggggaaggtaaatgacatgccctaggttacacagcttataagtagcagggattctgcccttctgtcacaccaagtcccactgtcttttcttcctggagtccctgtgactgatctaaaggccacatgtttaacagaataaggaggaggcctctgttgcagcaaaccagctaccccacccgcacacagactctaagggacatcctgctttaagctgtccttagttactaatacctcagtgagaatgagtttgaaattttctcaagagccatgggagactaggaagtctctaagcttcatagagagcctggcttggggggacacaggagccaaaggcagaggaagaagtggcagctttgtgcccccagaaacacgtgctcctgacctcacagttggccacagccagccaactctcccatccttctcccaccactttcccgtggggctaacttcaccctgtccacacggagtgacttaacagtttaagccccagagtcgggggccggggtacctgggacaagagtcctgagggaaatggggtgaggaactggaagtgccacagggctagagttctgcccctagcctactggagctgtgccccacaggctggccccactggactgcgctgcctccaagccatcctgggcatctccatgtgtagctgtcacgctcctcccactaaacgcctccctgtgcttcctctgcagttttcatgaacacggccatccccattgcagctgtcctcatagtaagtggatcctttctccatctcttgggggtagggtggagggggagggcgtctgcagtgacaggctgcccagatttggcctttctgcacaggggcctcagaagacaggctccacagccagactgaaaataggatcgaaagtttatagagggtgtggcccctccccaactccagccgaacaggggcctctgcctccaggcctggaagaccggaggcttagtatttagagaaattaaactttcttttaaaaaatagctatccaaatttttaatttttaaagtgaaacatgtgtattgtagaagtgatgggaaatccagaacagaaagctcaaagagaattaaaatcacccataatcccactggtaacatttttaatgtgtttctttccagtctttttttaaggcctatgatatgtcattttctacaaaaataggaatgtgctatgcatgcagttttgcaacctgctcttttaaatttaggaatatgccacacacaattctccatgccactgaatattatgatggtggctttctaaagcaattttgataaaagctgtgtgtgagctgagccatgggggtcaagcagcatgctcctacagaaaggcctgggcccctacgagcctgcagccccctcacccagcctcccatccccatcttctgtgatggctgcagttccttaaaaagatctgcttatttcccccggggccagtgtccctgagctgtgtagagttcacagcctgtcggatacacttgggaattcacttccaatgtgatgtattgagctggttcctggcctggctcctgggggaactgtgggtaacagaggccactgagccagccaggtggctggggcaaagcactgtgcagtttcgtaatcactctgtttacgttatcccgatgaggactggggagatgagcaccccgcctgctgtctgcagagggggccgtgctgacctaacccgagatctcctccctgcttattcccagccaagactgggcaggacagggagtcttggccaggacagggagggagcagcccctgctctccagcttgaagtcctgaacttgttggggacgtttccatgagatgactgtggggatgatgaaggtgtctccaactaaaagatcctcttaggagcctgctccctgacagccctctcatttcccttccagtgctgagcgtttccagtgtgggagggacccacaccctgggccaccctggcctcacttgtgcctctgtccacagactttcgtgggccacgtcagcttcttcaaagaggccgacttctcgccctccgtggcctttgcctccctctccctcttccatatcttggtcacaccgctgttcctgctgtccagtgtggtccgatctaccgtcaaagctctagtgaggtgaggggagggtccgggcgagggcactgggcaggcaggtcctgtgtcagcctcaaggcttgctcgagtgatggccaaaccacagctgtttggtcccggaacacacccccattgctgggccttgctgtagctggtcctggttggtcagagggacattggcctgtatggtttcccagctcgccatccctgagcaaggacttgcttacatacctcccaggagaggggactcactgtcactttcacgacaacttaaaaaaaaaaaaaaaccagtgttgagccaaatgtggaatcctcctaaattctacccactggtcctaacttcaccctccagagccaccaagaatgaggccatcccgtccccacgtggctgccccatggatatcagaaggcatccactgtgtctatctttcccaggccaagtatcccctaccctttccacagcccctgagccctcacagcctcagccagtgaaacagcttcccccaagcgctgggtcctgctctgattggcccacagctcttggaggctcccacttccaggctctagagcctcatggggactctgccactgtcccagaggcattgccctcttgggaatgaaagcctgaaggtagaaggctgaggctttggctgggaaatgccctgtctggagtgagaagatgtccttgggcctctgaagtagctctgcctccttgaaagcaagagcctgtcatgcctctatggagggctggcttgtccttacccatggccagagaaccagtcagtaacaaatgtcctctgtgtcttcagccttgaggaaggtgacacccctgtctcatgggaccctggcaggtactgggaagctggaaggaaggagtagctgttggaatgaagtagctgatagagagggtagcttgcagggggagactctagcatgggttcaaagatggaatggggcataactcagcaaaattatgctctaaggagtatctgaccaggcagtagctggttaaacagggattagctcccatttccacagtcggctgtgctgactcagtttcttgaccagggtgttgtggggtctgaagatcacccctcctcccaccacccactctccagccctatgattctgtgtagaaaccacagatttaagaacgctgcacctgcctgaaaactgttgcactgatcccaaagcgttcatattttcaaacactctggatcccactgtttccaggaatggaacaccagagtagcagaggccttttcagtgaggcagctcaggctctggctgaaggtgggcgcaggacactacctgaagcttcaccccaagagatgagggccagctccactcttcccagtcaccgcctgtgggggagggaggctggacagggcatgaaggcagagcctggtggtctgcccctcccatctaggggtggcgcacagaaagggagactccaggccacagctcacttacaccccagaataaccttgccttgagggtgggatggcttgtctgccccaggcctgttggacatttagcaaaagagaagaaaggggaatacaaacaatcctgagcttcccagaaagctttcacacctccaggatgggagagaatgaactagaagagtgaagcttccagtgcttcctcaggtccacagggaaatctggacaggggagagggtaggaatagccgcctcccccgtgagtaatgacacctcctccagcaggctgttatggggatccgattacataatgctacaaaacagttaacacagtgtctggcatttagtgtatgctcacaaaatactagctattgattctttaccaatcctagtcctaactaaccttaaccctgaccaatccaacaccaaccatccttcagtctaataacccagactaactaacttcaacattaaccctaaaactaaccaatctcacctccaatccagaccccagcctattccagctgactggtcaaccctagcaaaccctggtaacaccaattacctgcccccatgcccactggtctgcccccttcagtgtgggctttgtgggactatacttcaggcctgagatcctgctcagagctctctatcaggctgcgccctctcccctcccctctgcccctggcaggggtgaggggtgtctctgtgcttcccgagcagcgtgcaaaagctaagcgagttcctgtccagtgcagagatccgtgaggagcagtgtgccccccatgagcccacacctcagggcccagccagcaagtaccaggcggtggtgagtgcccggcctccccttgctactcccagcatggtcctctaaggcccaaaacttgggcctgctgtgtcggacttctgccttttttcccaggaagaggggctcccttccctacacagctcccagcccagtgggtcctcacctccaaaccacccccagcccctcagggttgtgaaccgcaagcgtccagcccgggaggattgtcggggcctcaccggcccactgcagagcctggtccccagtgcagatggcgatgctgacaactgctgtgtccaggtgagtcctgctgccccatgcctggccacccagcaccaactcccagagggagctcagcacctggaaagccagaaagctgcatgcttagtcctctgcagaggtcaccctgcctgcctgtacggtccataggagtccagaaaccagggaccaccaagtggggggacccccagccttaggcaagggtcagcatgagaaggccagtctcccactcccctgctctggaagtgatccaggggctggaatcagtgtcttttggctttcatggaggaggggaagccagagactattcactgggaactggctgcctttctgttctctcctgggcggtgggacacgcctaatgaagatcatgggaggctacttcacgtggaccccagatggaatccccacactgtccaacatcaccattcgtatcccccgaggtatggcccagtccacccctccagcatgcccctccccatgtcccactgaataacatagagataaaaagacaaagctgcatttattgagcacctactctctgctcattcttggtgtatgccctgggtatattatagaaggggaaggctacattctagaggcttccgtgtgctgggtgggagtgaagcactaaggacagggtaaaattgccagccttaatgtcaaaccatccattgcagacagtataggtaatgcacaaaaagatcagaagtgggtagccaaggaacgcaagtggaagtgatggggtttctgagaatggacaaaggccctgaggccatgaggcaggaggattttctggcagaggcagccatgagcaaagtatggaggtgggttggaggtgggacccaggatggtgtttcttgggaccacaaggagcctgggctcatactaggagcatgggaaaggagaagcgagtgcttaggaagggtggcggggcaggaaatcagagagggggaaggacctggggagccagaggaggatgttgatttccagaaggaaaggattaaagagggagaggacttgctggggattctaggtaggaagaaagaaaacaggggccccagggttgggtgcatctgtctgtctgtctttctgggtaatggttgttcagactcccccggccccactcacatctgccaccctccctccctgcaggccagctgactatgatcgtggggcaggtgggctgcggcaagtcctcgctccttctagccgcactgggggagatgcagaaggtctcaggggctgtcttctggagcaggtaatacatgtatcctcagggcccagtggaggggaaatctccttttaaccatcctcctcagttgaggatgcacacacatttattggagggcccactctgtgttcagtgaggactcaataaatgctgctaatggatattctcatcatcatcactagtacgtattcacctcttactatgcgcaggttctttgctaagtcctttgcatgcattatttcatttaatttttatgataactaacaaggtccatactgttctcaattctcatttatagaggaaggttaaactatttgtcctaattcacacagctaataagtggcagagctggaattgaaactcagttctgtcagactctgaatcccatggttactcagatgcacggcagtaatttcccagtgtgggaaattgcaacaccaacattggtttccagcttggtcctgagctgcactgacctacacaccataagtgggtgttctgaagatccagatgtaaccaataaatgttggtttctgggcaaagatcactgtcttaattaaagagccagaaccccaggctcagtcaatcacgaatctgttatttatacccacctacttccaagaagcacttgaaactagttgatgaaagattcatgtaaaaatcaaaaccacaatgagataccatctcacacccgttagaatggtgatcgttaaaaagtcaggaaacaacaaatgctggagaggatgtggagaaataggaacgcttttacactgttggtgggagtgtaaattagttcaaccattgtggaagacagtgcggtgattcctcaaggatctagaaccagaaataccatttgacccagcaattccattactgggtatatacccaaaggattataaatcattctactataaagacacatgcagacgtatgtttattgcagcactattcacaatagcaaagacttggaaacaacccaaatgcccatcaatgatagactggataaagaaaatgtggcacatatacaccatggaatactatgcagacataaaaaaggttgagttcgtgtcctttgcagggacatggatgaagctggaaactatcattctcagcaaactcacacaggaacagaaaagcaaataccacatgttctcactcataagtgggagttgaacaatgagaacacatggacacagggaggggaacatcacacactggggcctgtctgggggtggggggcaaggggagggatagcattaggagaaatacttaatgtagatgaagggttgatgggtgcagcaaaccaccatggcatgtgtatacctatgtaacaaacctgcacgttctgcacgtatatcccagaacttgaagtataataaaaaaagatgcatgtaaaataaaaccctttaaaaaggtaagaaaataggaactgagaaatgaagagggtaaaaagatgttcagcaacctgggcagaggacaactacagccatcaacataaaacctggctctgtgccctctggtagccaagggaaaaagggatctctgggctttggagtattcatttaggaataaaagttgcagccaatcagcagaagggcaagctttccctaccaatcatttctaggggaaaattattgaaggtgtcaggtttttcataagcatgagtacagaactgagcagggagaaagactttgggcccaatgtctgaatatcaacatgcacccccgtttcctgcatttccaagatgtccctgaatggtgtatccaaaagatggcaaatttccctcctcagtggggtcgtgggctagcagatgagccccttgggtttcccatcacctcccatcagggactgtgatgtctttgggggcagaggggtctttgcctccattcgccattttatttgggagatttttcaacatagcctgactgggaaggcccaggtattcggtttgagatcatattgccttattccgactgcctctccagcctttggagggaggagcccttttctgctgtccaactgcatgcctgcagcaagaagacaagagtccccagtgcactgtgagctgaagaaagtaaccaatatttattgggtacctcctatgggccatgccctttgctaagtgcattgtcaacatgatctcatcaagcctcctactaagtttaggaggggagtgttgttaccccatttcacagaagcagaaactcaggctcagagaagttgggtgacttactagtcagtgtgtggagcagagactctgcccatgttctttccctcaaacctggtcactgctggggcccccagggcctagtcctaagggttattgtccaagccccatgtagtggtcaggctggatctgggctctcctccaaggcagggcttttccagaaggattgcagggctcagacactggagctgcccctgccttgacctgctcagcatggatgtcaaaacccactctgaacctggtccctttgccctgctttcttctcctcccccaccctcatgccctcatgtggcatcgtgcctgcctcaggagctctccttgtcctatgtagatgaagcaggcatgattggcaggggtctgctctgccctgcctcagtccccacctcttctccaagctgtgccaaccctccgggtctgactgctgcccctctctcttaggaaacctctgccccagcccagggaacacaaggagcctctccaaggcagaggaccctaagcacttcttttttttattattttttattttattttaggttctgagatacatgtgcagagtgtgcaggtttgttacatagctatacatgtgccatggtgctttgctgcacctatcaacctgtcatctttttaagccccacatgtattaggtatttgtcctaatgctctccctcctcttgcctcccaccccccgacaggctcggtatgtgatgttcccctccctgtgtccacgtgttctcattgttcaactcccacttatagtgagcacatgtggtggttggttttctgttcctgcctaagcacttattataggccaggcactgtgcaggcacctcatcatctcagtcagtctgcaccgaactctgtgcagtagatattattatatcctcatttatcagattaggaaactgaggtgaagcaagttgtccaaggccacccagctgttaaatggcagaagtgggatttgcacctaggtgctcaagtgcattggtttgccaccatgtgctcaaagagaaggggcacaagagcctcatgaagaaggcatagctagcctgacagtccaaaggccagcagccgctgtggccatgactcacacacacctgcctcctcccagaactgccacgtgggtcctcacagctctgtccttatcaacacttactctcctttacaggtagcctaggccccagctcccagctctgttcgaggctcgcagaggggcggtagtgaaggggtctcatttctccaggatcctctttgctctctcgcccggtcctggtccagcttccctttcaagcatagtgaagtgcatttgttagcttgcagccaaccctgggaaatcatgagaatttgttcccaagtcaactcattctccagcgtccacagtgacgtattcactcacccagttgagcgcctagtgtatactagaccctgtgacagcaacaggagtgcaaaggtgactaagacgtggcccctgctttttttttttttttttttttttgagacggagtctcgccctgttgcccaggctggagtgcagtggtgcgatctcagctcctcacaagctctgcctcctaggttcaagcgattctcctgcttcagcctcccaagtagctgggactacaggtgtacaccaccatgccggctaattttttgtatttttagtagagacggggtttcactatgttggccagggtaatctcgaactcctgacctcatgatccgcccgcctcagcctcccaaagtgctgggattacaggcatgagccaccacccctggccggccccgcttttaagagaggggagagaagacctgggccttagaagagctcagaggaaccacaattgactctgcagtcaaggagaggaggctcactgcggatgtggtatttgagccttgaaggatgagtgtggtttcatcaagtagaaaaggcagggatgggaaagggaggtggtccaggcaggggtgatggtgtgggcaaagccttgctgatattaaagaacatagttctgtgcacctggaacactggatgcatggggtgcattatgaaagatgggactgaagaagtgaacttggcttagatcccatgtagtaggtctgagaagtaagatttaacccaaaggttgcaaaagaaccatgcttgtgataaaggatgatggattggggaaacagagaaaaagacagacagactgtaggaagggaggtattagcaaataatcataacacagtgtgaggtgtgcattaatattcactcattccaagtattgatcaagaagagaggtaggtactgggttaggaaacagcttgggcaaatgcatggggaaatgagagatgtcaagatgcattctaatggcagcctcttgaagatcttaagttgtttttggttcactcatttcgcaaatgaattcatttagcaaaagcactatggatacagtgcttacctctaggaagtaagttttagcccaaatgctgcagaaggatcatgcttatgacaaaggatgatggactggggagagagaaaaagaaaagacagacagactccaggaaggaaggtcagtctgcagctccttatagtggctaggagaaggagtctaggcagatacgactcaattagcttcatctgctgtttgtctctcaaaatctagacatgtgcactgctctggctggcccacctatcctgggcattgagttaagtgtgggggctgtgtgttgagagtccccctccattactggcaggaactccacacctcagacattgagccccaggtctgcagggagaagacgtgcttgcaaagtgagctaaaagcaaaacagcctctgacctggcaagcattcccaagtctgcacgcctgcagccagaggagagggtgatgccaggctgctgctcagatgcttttcagccatacccaggccaagacctggtgaccaggcagccagaaggagttccaggaggcacaaggcaggaagttgggggattaggaggtgtagaatggagaatgctctggggagatgggtgctttgttggtgcaactattcgtttattcctccagtgaccacgtgagcagtatggctgcacacacaggctctgcagccaagctgcctgggttcacatttggtctctgtgctttggaaaatttcataagctttctctaccagtttcccttattacccatgagattgatgtgaggattaacctagcatgtagtaaatatcctataaatattattattcaatagtgtacttctttgccaggaacaaaattcacctgttcctctttaaatgtcctccagtctgtctcctgggaaagattcttgtgagctccctggggacagggaccatattttgtttgtctcactgtatccgtagtgctttttgctaaacgaattcacttgctaaatgaatgaaccaggaacaacttaagaccttcaagaggctgccattataatgcatcttgacatctctctcctttccacatgcctttgtccgagctgtttcctaacccagtatttcactacccctcttctccatcaatatttggaatgagcaaataccgttagtgcatacctcacatggtattataattatttgctaatgcgtctgtctcctccatgactctgagctccttgagggattattccatgttgtaccccaggtgccccatgcagatgtgtattttgtgcactgttctgtgtaggctacaaaggaaaaggcctagcacctgcccttggggagctcacccacccaggatggacagaggtgtgcagacagagctgcagggtgggcacaaagggtccatctgctgaagtcctgcagatgcagccccgagcttgtccctcacgtcagcagcctggctcctggtctcagagagaactgtgtggttcccaagcattcactttaggaagaatcacttgcccctccctggctctctgcttcaaggaactgtgacaaccttgggatttgcaaactctctctttaatccttaagaggaaaatgttttggtaaaaagtcaagattagcagatacactcgggtgaaattctttccctggaaataaagaatagagccattaatatccacagtagagtgactttaaatgcccccggggggtcagcaggaaccagggccctgaggaaaggatcagcgtggggaagaggctcccacttccctgtgaggagctgcacatgcagtctcactggagctccctgctgcaatgctgttgcctgtggtggttggtgtggatgctgcctgccaagagccctgattccccaggaagagagaaaaaggcttctctcaggacggccctggtcgcatctgcctgtacaattcctggagcctttggggagctgaagtcaggggctcaagtgcccctgggtttcctggaggaggcaggtgtggtgagacagctgacagacaggagaagggatgctctgaggaagtgactgtccagccatgggaaccagatggcccctggctgtagtcctgatgctgccacttgctagctctgtgaccttgagcaggttacttcacctctctgagacagactcactgtctggacaatgagtaaaaccctacctttcctgtctcagagatttggcaatgggacccaatgacatcaattggaaaggatgctgtgggtgaaaggtaacctttcaggacagcgacaagcctgtctgggcaggatgaatgggctgtggagccctgtatatcctagctcactctttgaacctcagtttccacttcttccctttttatttattgccggggtcttaaatgagtgttgggggtatctgattctccctctgcctgtacttttggggccaagcactgagctgaaaagacaattcctcctagttctccaagcctacaacctgccccctaaccagctgtgagctgtaatacattctccagtgtcactgtgaggtttgtgccttcacccccattttatagatcaggaaacagaggctcctccaagtaaaggagcttgcctcagatttcacagccaatgagtggaaaagcctctgggattcaaatgtcagagcccatatttttcctacttctcgcacctgttatcatatgctgcctcttcctttaacctgcagttccctcccttcacctccaccgtctcaatccttcccactctttaaggttcagttcagctatgacttcttctatgaggctctactcattttctcagatttcttcctcctccaaatttcttgtaaaaattatgttttttctctgattctaaaagaatgcacattacattagaaaagatacacaagcatacagaagataaaaaccacctaatatcccatcacccagaagcttccagtttttctttatgcatttgcatatgcatttgtgtttacttttccccaaaagttctccgatactttgtcctacttttcttttgacccttataacttcctgacttcggtacctttctgatttgccctaccagagtgtgagcccctggaaggcagcctctgcaccctgattcaggttgccacacatatgccagctcctagtgggctggagggaaggacatgcggttggggaactggaagactcatgctttcagctgtgtgcttcctccctagagtgcaggcagaggaggaatcgaatcccctcagcactcttgtaaagaccacagcaatgagtgagagatggtgcctgccagacataccattctttacttttcagcttaaaacagatacaaagtttggggaggctcactggaggaggcttggggctacactggaaagagaagaacttggattcacaccccagcttcccctcttcccagctctgtcacatttgcaaactctgagtctcagtatcctcatgtgtaaaatggggatagggtttatagggttgtaaggatgagatgatgagttgtttgcaaacaacttctcacagtgcacagtgaaggtcagcaatgagagccagccccgccctttcttctttccaaatgattaatatatctgttaccagcctccattcattatatagctctgtcatgtgctaagcaccatgggggctgaaaaagatgttcttcctgccttaaaattccactggggatgaacaaattacacgggagctgatcagagaggaaggcagtccattatgagggctaattgagcagtgcagaccatgttgcaaactgagttagggcctggagagcttactgtgtgctggggtcctcaggaatgccacagatgcatcaataaccacctctgctactctggaagtagtcacatcaggaagactccagagataagcttatctgggctgtggccacagagctggaatttgtaagctttaggtttctatgtctcatgttaccagcttgtctataaattgtaaattacagccatctgatggttagggaatatgaagtttggttaagagaatgaaatgagaccacgaagattagagaacaggaaaagaggggactggggactacatacccatcagaatcttcattcagtcctgaccctcagcaggagggggatttcatcaggctcatttccatccttgatttcgtccatcctggttctcctgacaaggggcatttatcagagttatggcatgggaaatcacaggggagtaatgtaccatggcatttaagagtatgaacgttggagtcggagctattttctccgctacttactagctgtgtgactttgggcaagttacttagcctttctctgagcctcactttctttatctgtaaagtgagggcgatcagaataaacctccttcatatggttattttgagctttataaagagacaatactggctgagcacggtggctcactgccagtaatcccagcactttaggaggccaaagctggaggatcgcttgagcccaggagttggagaccagcctgggcaacatagggaatgagactcctgtctctacaaaaaatatacaaaaattagtcaggcatggtggtacgtgcctgtaatcccatctactcaggaggctaaggcaggaggatcgcttgagcccaggaggtggaggttgcagtgagccaagatcacgccattgtactccagcctgggcaacaggagtgaaaccctgtctgagagagagagagagagagaaaatactactatggtgcttataaaagttcaataaattttagctgttgttagtattattaaagtaagatctgtatgaaaataaagcagattttttcccccaaatgttcatgtcagaagtatatatttcattggcaaggggctgcttctggaaggttgagaggtatcctgggggaggggatagagcactggcaaaattggcatcacaattcaagtcacctcactcagtgttttttaagttatcaaaatccacagtatgaaaagcatttgacattacagtccactatatttatgcatttataaacaagagaaaaaatcacgaaaaatacagtaccacgtgcagtacacactgattccatctattctttttttttctttttcctcaaatgcacttgccgcctacttattccagacccaatgattgggtccctatccacagtttggaaaacactataagaaatgattgtgtcctctcactttccctctctgggatttagttttccaactataaaatgctcctgatgcccagccagcctcaccgctgctccgagtcaatgccaggaacgctgatttagcacatgctatttggagggtacccatccaggtgctgtgggagggacagagattgagaagagtgctttctgaccccacagaggccatttggaaaccctgggaatgggtgggagggttggaggtggggattgcttctcccctaagactcagcgtgatggaaaggcaatggggtgggaactaactggtgttggtctgtcccatttgtgtcccagcagccttcctgacagcgagataggagaggaccccaggtacagccttgggactgggtcagaagtgggtctcaacaaagggaaggggtagggtgggggtggaggacttgtgggtgggtaatgctgagtatggattcagggatgtgcagcctacatattttcagagacatggggctaaggcctgcattctcaatgagggcaaaatttggttcttggggacagaaaacacttagacattgcaatgctttgtggctgtccaaagtaccaaacagatgccagtatatctgtggtgctgaaatttcatggtgaatggagtcagaaaatagactagcgattgccagggtctggtgggagagagagggaagggactgccaatgtgtatgggatttgttttggggaagataaaaatgttttggaattagatagtggagatagttgcacaacctggtgaacgtacttttagtttcagaggttttctaaacctctgatttttttttaagtgacaggaaagacagaaaaaagtatatctaaaaaggctctaggggtgatcatggaaaagaaagttaagaaatatgactgtaaggaaaggagatgggtgtccctcaggccaggcagaaaattcagtcttgttgctttatgttcatgtgcaaatctaaaaaatccaagtgatatagattaatgaggctctgagtccctcaaaaccttccctccccttacctctccaaaaaacacttgagataccctagaggtggtatgaagtcaggatgggaaggttggctcagctttgcaaataagtttaagcctctggcctttgctctccaacaccaaagaggcttcactttggtatattttctctgccctttctccctccttgtccccaactgtcagtatgtgatgacaggctcagcctctgtaatggtagtgatcatatttcttgagccaaaaatcagacctcatggcatgtgacaagtttgcatatgtggatgagaacagagtggcagaatatttgacacgggagcagcttgggcagtccagggcacatggcactgcacctgacatccctggcagatcccccacattccgtggttgtcttctgatggggccatatggggctgcagatcatgcctggagccctcgcagctccagggctgcgggttcccagccccagagtgcaggtgctggtgtcagcctgcctggcctggcctggctctgtccagagcactccttgccccagctgtttgtgcagctgtatcagcctcagacctcagcctattcattccaacctgaatgcagaggctgggtctggaggagccacattgcgggcttcatactcctgatctgacaagttttccccccagagcctgcaccaatggcacctctccccattctccctcttaactgggtcctccagggccctcctcacacacccacgtggtcaggcagcagaggcttccccaagatgggcacaccccactctccacacctctctatgcagcatttgtggctacagactgggtccaggggattgtaaaggcatgctcatgttgggttggagggagctcaggatcttcctggaggatatggttcactcccatgagagctcagtatgcctttcctcccctgctgcagcccagagcgggagacagcgaccgacttggatatcaggtactgcgtcctgggaacattgccccccagggtcaactccctccagggtgctctcaggcccaagggagccacatcaccctgctgggcagcccccagaccccagccccagtgttgggggaggccagggagggcccctgtgctccaccaggtggctcgggagctgctgctgtttctgtgcatccatttactcccttcacataagatcatttttatctgggatctctttttcttttttcttcaaaaaccacatcactcaaaatgtggcttccttggctctgcttttaaaaaaaaaaaaaaaagttcttccatttggagaattacctgctgacttcaaagtccagtggcttgagggctacccaaagagggaggaagccagaagttgagtgttcccttggtttggtcacacttttgggctcctccctgactaaggaacaacagactgcagggctggggcaggctgggtgtagggcagggaggggatgaggtcctgctgccccagtcagttgagacccagacctctcaaacctgcctgggggaaggcaaggccaccagaggccacactaagcagatttctaccaactgcacctccccatccccttgcctccatctgagccatcagcttgacaactgcctctgagaacaagcccctgagaatgccttccgcaccccctactcccgccctgctttttccaggaagagaggccccgtggcctatgcttcgcagaaaccatggctgctaaatgccactgtggaggagaacatcatctttgagagtcccttcaacaaacaacggtaaaagcctgtcggagggaggcaggatgtggaggggaggaactgtctctggccagcctgccccagttccgggcccctccatcgatcacccacacccagccatctcactccccaggtgcttacctgcactccagcctctccatatggtgcacctggagaggggccaggtgtgcctgagcattggggcaatccagctcccataggggagagggcaggaatggagggaagggagagagccccgctgccttttctctagctggtgggagggctagctagctctctctgtgagtctccattcgcctggctcctgcactattttccctccaatgataatagttagggctagcatcgactgcgctcttactacataccaggcacagtgccgagctctttgtacacggaatttcctctcatgcttacaacaacctcagtaggtagatattattgttattcccactctacagatgaagaaccaagtttcagaaaggtcccaaggccacccagccagtaagtgaccaagatgggtctcaaatccaaagctgcctaacacctaagtacatgtttgtcaccaacatactctgatgcctccatgaactctggctggcacctgcccaggctaagggctggctggggaagtatgagaggaacaggctgggcaaatatttgaccagccatcatcattactgcctaaaccaaccagcagtggttttccctgcagtgccccaagcacgggttccggctgcagcttttcccactgcacagagatcatgagcgccctttcatcacttactctgcatatttgttcccaaccaattccatccttctagtatttaacctgcccaaacgctgtgtgaagtgctgacctcagctcttttcaagctcacacggtgtttgcttgcacccaagcgggaggcctattaaagccattgctcaccctgggcatagctacccagagactaatgaccctctgcaagtgctcgggccaactctgaccaggctgaccagctgcatcccctgcctctacccacgccaggtacaagatggtcattgaagcctgctctctgcagccagacatcgacatcctgccccatggagaccagacccagattggggaacgggttagtagcagcctctgaggggttttttcaaagccaggacccccaacctaccatgccctgagacactactcaggacaatgggtaactaggaaataggagacattgaaggctgaagagttgcctgcagtaaggtcaaacatgttgttcttgatgatgtcctttgacaggttttcagtcctgcttggagggcaaggtcagcttagtgccctcccaggctggggatcttcttcatttgcaccccaggtatacactgagagcccacacagcactgtgctcagcctggggttgtattgttcctgttcatcctccagatggggtcccctccacaagcttagacgaacaggattctcctgtgactgtcctccttttgtgtgattttaatccctgctgcctctgtctttgtttgtactggtcagatggtccctagcgcctacacaatgaatctttaaagacttggggctcatgctgccctcttctgaatgaattcagtaaacacgtgcaagttccttctctatgcaaggtgagaagcaggcaaagaagtggatagagccaggcctccatcccaaagagctcatagtccagtagggtacaggacagtgtctcctgaatggctgagggcatgatgtgttcctcctctttggtgacagggcatcaacctgtctggtggtcaacgccagcgaatcagtgtggcccgagccctctaccagcacgccaacgttgtcttcttggtgagtgcaagttcccttggggtcctggtctctggctgcctcccaggcctaactgcccacctccacctccccgcaaccccaccatcatccaacaatctccctctccaggagtaaatccctcctgccagagatattgccttatcatcctagtgatagggaaactgaggcaggcaaggatagcacaaatgacccattgcagacttcagatggagctctgcagtagccaatgaggagaggcaagctgtagttataggctgcctgtctgtgggacagcccaacccctcaacacttatgcagcccgactataagaatggctgataacagaatgtgtgctgccacttcccatcttatgcccagtgcagacattgctaattgttcacagcattatttcccatggaacttaactcatcctcagaatccttctcaacacagcactccaggtaaccactagccatcaaacatgagataaaactaggccaggcgcggtggctcacgcctgttattccagcactttgggaggccgaggcaggcggatcacgaggtcgggagatcgagaccatcctggccaacacggtgaaaccccgtctctactaaaaatacaaaaaattagctgggtgcggtggcgggcgcctgtagtcccagctactccggaggctgaggcaggagaatggcgtgaacccgggaggcggagcttgcagcgagccgagatcgcaccactgcactccagcctggggacaaaccgagactttgtctcaaaaaaaaaaaaaaaaaaaagaacgtattcgcaatccttacactacttcatgtcaagttctgttgtgtcaggtgccttgactgacactgaagaattctaagaaccagtccttggcctcaaagatttagaatctgattagggagacagagctcacccagttcaagaggcccagcccggttcaaatccaaactgtgcggcataaactatgagggggccttgtccagggagacaactgtgagggctggagtaatcagggagggcttcctggaggagagcctcaaagggagagtcaattaaacagaaggaaagagggaggccatttgcacagtgagttggaagaaggaagctcaagtctctgattccagctttattccctcccctctccctacaccacacgcacaagcactcctttactaaagacacttcacagtgggaagattcagtctccgttaccgtctgacacacacacagcgttttacaaagcatgggtgcattcgcgatctctcatgagatttaaacaaccctgctagagaaaagtgaagtggacattttatttcagtaaacgtttatgaagcgtctactctgtgccaggcactaaacgtttatgaagcgtctactctgtgccaggcacaggcacaagaagtctcagttcttgggagtgccataatcaggaatggacaaacaatgatcagatctggctttgcgccagtgtcacgggaatagggaggaaggaagggtaggcgtgggggtcaggacaggatgcaggaggaactggtgcttaggtgagcgaaggatgggtgggagttcacaaggcagacaaaaggcagagcagcactccaggcagaggaacagctcaggagaaggcccagacggcaggcttcctgggaacctggaatgcagagtgctgggaaagcacagatgaagcatgagtctagaagggaaagcgagaggttataaagcacctggaacaccagcccacagggtttgactttagagatgatggggagccgttgaaggtccaggagtcaggcagtgaagtgattagatctgtttgagagtgatatctgacaactgccccattttaaatgaggtaaccaaggcccagagaggttgggtgagttgtccaaagccacacagctaactagcttcagtccctagagcagagttgatagaactctaatgggttttatactcattgtcacccctccccaccatgcctttccctaccctctactctcttcctctcccttctgcccaggatgaccccttctcagctctggatatccatctgagtgaccacttaatgcaggccggcatccttgagctgctccgggacgacaagaggacagtggtcttagtgacccacaagctacagtacctgccccatgcagactgggtgagggggaacaagggggtcaggctatagggggcagggctggggaggctgtcaggcatcttggcaggaaccaatccgttgtcttggtagcaactgctgagggccacaaagcataagagaccagcactggatggctttatgcatgctgggcatttcagggagaccctgtacaggccaggggtttggtatcacctagacccacagacactccccatcctggcccgggccccccatggtacactcaaggctggcaccaagaagtctcaggaataatcaagtgctcacttctcaccttctgattcctgcccttttgatgacccatccccgcagtcatggggagtgcccatttggatggaaaagccctcttcccaccctatgaccttcccggggtggatggatgcaccaccccgggaatcatatgggaaatatggaaccaaacaatagcagtagtaatagaaacttcaggctgggcgcaggggctcacacctgtaatcccagcactttgggaggccaggacaagaggatcacttgagcccagaagtttaaggctgctgtgaaccatgatcatgccactgcactccactacagcctgggcgacagagccttgtctctgaaaatttgaaaaaggaaagaaagaaagaaagaaacttcaatattatcagtagagtccaatgttgtgaaacccctcattaactaaatttccatactcttcagtaggtagaaaataattactttttgattcattagaaagcacttaatttttaagatggagatcatgtaattttgaactctaggtcttgcctactcctatataaattctcctctaaacaacagccaaaattgaggccctctttgagcttcaggctggtgccaaatggctctgcttattttccccaaaataaatcttccttccatgtatgatgagaccccctccagtataaagaagacccaaagaaaatcacccaaagaaaaaaggcccaaagataagacccaaagacctaaagatttaaatatatatacagatacagaaggtttgtttctgagtttctgtagtgaccttggcaataccttgtagttcaggacaatcctgaggaacacagaagtgctggcttccttgaggaatcagtgatcaggactctcgagccccttgaaccccagcatagggcgggagggggtgagggcagcaggggtgggtgtctgaattaatgtcaggtctacgtgatggtgtcatcaagtgttccagataaaaagttttattgagccgggcgcggtggctaatgcctgtaatcccagcaccttgggaggccaaggcgggtggattgcttgagcccaggagttcgagaccagcttggggcaacatggtgaaaccctatctctataaaaaaaaaaaaaaaaattagccaggtatggtggcgtgcacctgtggtcccagctactcaggaggctgaggcaggaggatggcttgagccaggaagcagagattgcagtgagctgagatggtgccattgcaccccagcctaggcaacagagtgagaccctgtctcaaaaaaaaaaaaaaaaaaagatttattgattccaaagaggcatggccacacacacttagaccagcaggtgctttgctaagccctgatggaggctgccagacccgccgtcaagaggagctaagggtagtgtacaatgagcccacttagtgtatgacggccgctgccgtgggtggagtccttgtgagtaaccagccagcttgagcaggatgcactaatttgctctgcaaacccagccattgagaaatacgcctcagatgtaccgaactctaggtcctaggagtatgttggttggggtaggttatcaataccagcccacttgcagtggatgagctggtggccatttgtagtgaggaaagggatgtgtcaacctccatcttagactccacaattgagggatgtgaccaccattcctccccagccagcccccaaaccacgtttgttgctgcctttccagatcattgccatgaaggatggcaccatccagagggagggtaccctcaaggacttccagaggtctgaatgccagctctttgagcactggaagaccctcatgaaccgacaggaccaagagctggagaaggtgggtatatccagggatggccaagcagccacccctggatgcaaaggttctgctagaacctgaactcataaaggtcttcctgtccttagtgccccaggaagccccctaaagggcagatgtgggagctgggcatgaactggctcctaccagaggagagacagtacctgtgccaggtgcccagggcagaatcaggtgggcaccttcgccttatcctgaggtagtcagatactatttagttgcaaagtttcagaaaatcaactcaaactggcaaagaaaactaagcaaagaaaacaagagggaattaaggatttattgacccatgaaaccaaaaagtccaggtgtgtcatagctttaagtgtgctggatccaggtagtcagtgtaatcagaaatctgtttctcccatctcttgactctgctcccctcaaattggctcagctcccctcaaattggctccattctcatggtatcagtgagggccaccagcagtcttaggtttacattctcccagctcaacaactctgccagaaaaaaagtgcctctttccccatagttcagcaaaagtcccagggctgagtctcactggtccagtttggtcatgtgcccacccctgaacaaatcactgtggccagcggtgtggaatgtgaggattggcctgtcctgggtcacgtgccactttgggagccagatccacctgaatcacagagactaaaaacaggggaagagtggttccccacagggatatgggggtgctattatctgatgaaggggaaggactaaatcctggcaagatgaatgtgtgtctgtctgcccctccctcaggcagggacaaagtagaaatctgacattggtcatcaccagagtagttaccccttaacttccccttcccccaccaaccatatatcctgaagacattgcccaggccacatctgtcttttaggagactgtcacagagagaaaagccacagagccaccccagggcctatctcgtgccatgtcctcgagggatggccttctgcaggatgaggaagaggaggaaggtacaggcaatgggactgggagtgaaattatggcctgaggtctgatcagccacagagaggctaaggtttggggttctgggtgtggtgcagtagtgtgcctttgattaaatggcttccctctgtgtgcccccgttgtcccctcagtaagtggggataaaatgccctgattcaccctcagagggatggaaatgtgtagccacagagtgggttcttgcggcctgcagaggaggcagctgagagcgaggaggatgacaacctgtcgtccatgctgcaccagcgtgctgagatcccatggcgagcctgcgccaagtacctgtcctccgccggcatcctgctcctgtcgttgctggtcttctcacagctgctcaagcacatggtcctggtggccatcgactactggctggccaagtggaccgacagcgccctgaccctgacccctgcagccaggaactgctccctcagccaggtgtgactggcggcccatggcagaggttgggagtggggatgggggaagggctgagcccatgggcaccctggaactccaaatcactctctgcctgtgaaggagtgcaccctcgaccagactgtctatgccatggtgttcacggtgctctgcagcctgggcattgtgctgtgcctcgtcacgtctgtcactgtggagtggacagggctgaaggtggccaagagactgcaccgcagcctgctaaaccggatcatcctagcccccatgaggtacccgtctcccctggccaggctgggactgtgagcaagtcactgttctctgagccttagtcttcccatctataaaatggggatatacaacctgtcacaagcttgtgggggtgactcaaggagacagtgtgtgtaaaagtgccctccttgtgcaagaagcagggagaaactggcatttactcagccagatactgtgataggcattgtgtgtggttagctcatttaattgttaccatggccctttaaagtgagcgtctgcacatccaagtaaagattgttttctcctccctaagtgggtgtaatttgcccatccccacccatgagttcagctccctgccctcccctcactctctctccctcagccagcctcaggttttgacactgggggaacaggtagctgttctattaataatttcctgtaatgggatggataaaaatctcaaaggccacttgatgtcaaagaggtttaaagttgtccctgcccaattggttggccaacttggcttaaaaacacaacaggcaaacagattttctggccccttgtcgaggctagacctcacaatctaactgcactttttactttccagcctcatgagttttctgtggcccacagatatggcctccaagtttatttacttttactctctatttgccccagctctgtagttctgaaactccctggttggggttgggctgactctgggtcagccagccggcaggctgtccccagggccctgttcctcttggcaggttgtccctctggagaggactctgtgtcccaggaggacagctgctgagtcaggccgagccggcagctgagaaaggcggcagtcgtcagatgggcttgagaaactgaaaggctaacgaaaggccagcgcccctttgggcagctgcaggaattcacggggatacaggccagatgtctacaaattggcagaggatgccagacccatgaatgactccagagacacttacatgaaataattaactatctcattcagtaaacaggaagtaaatcaatggacaaatgagtaactcttcctctggctgcctcttaggttttttgagaccacgccccttgggagcatcctgaacagattttcatctgactgtaacaccatcgaccaggtacagaggaccgtgccacactatccccccttccagagacacctcggacccctgggggcttctcctgtctgaggctgggttccccagatcaggtgatcacagccctctgggaagaagccagtgtccccgatccgattataatgctgcttcagggctggggcctccctcgtgggagcctcacagtaaggctgagggaaaccagatccctttagcttccacctgagatcccactggctttctctagtaaagttccagcatattctgaaccaaggtggctgattgtatggagaatattcattttgattcagcctgtgttctttatttaccattgtaccagatggtgtgaaaacaaaatcttgattcctacctcagggagtttaccttgtagctggagagatgagatacgtgcctataataaagggagagcaaggccgggctcagtggctcactcctgtaaccccagcactttgggaggcggaggcaggcggatcacttgaggccaggtgttcaagaccagcctgatggccaacatgatgaaaccccttctctattaaaaatacaaaaattagccaggtgtggtggcaggtgcctgtaatcccaactacttgggaagctgaggcaggagaatcatttgaacccaaggggcagaggctgccgtgaaccgagattacgctgctgcactcaagtctgggcaacagtgagactcagtctcaaaaaaataaaggatcaaaaaataaagtgagagcaaaacatggcggccagtagcactctaaacacagtcaataccaaaattcacctcactctctccccctcgtctccctcagcacatcccatccacgctggagtgcctgagccgctccaccctgctctgtgtctcagccctggccgtcatctcctatgtcacacctgtgttcctcgtggccctcttgcccctggccatcgtgtgctacttcatccagaagtacttccgggtggcgtccaggtgatggcctcaggggtgaggggtgggaggtgctttgcaatgtgcagtttggtgtacttgctagactcatcgttatgagagtaatagggtcgtgttccctccaaaaaataaaaacaaaaaacagaaatgaaggaaatagaaatatccacatcttattccaccgccctaatataatagtctgccaacacacgcacacactgaggttgacatctgaattatttccttgggcgatatggtcaggactggaattgctaggtcatgataaatgcacattttatgcccttcattcattttgccaacatgcttcccaggagggttgcatcattctagtggtcaggctgattgctgatgcatgaaatcggcgggcacctgattcaagcagtgttatgataacacctcccagcccacgtgagtccagagtgtagctgtaagccttgacttgagggagcctctcacagccattctcatggatcacatttgccctcatgagctttggatccatgcacgcctctttcctcctcaaaattttctaagaatgttctctagggagttctttctgggagtgattctcccagattcatagaaactcatagattcaaaaaattgtaggaaaaaatttaaagaacgtctaggccagtgtttctcaaactgccaattacagcccatcagtgggtcatgaaatcaatatcatggatcacaaccagcatttttttaaaaatgaaaaaaacatcagactgtattcatagagtaaagcaagctttgcttcatgaaacctttgtgttggtcatggaggtgtgtgagtactgatttgtgagataaaatatatttctgactgcaggttgtggtcagaaaggttaagtacctttcccaagtgcacatagttggctagaaactagagttgagatacttattagcaataataaaatttagatgcattttggacacaattacctgccccaaaggatcaacatttgtataaatggctttttgcttggatgatccagaatggcccgacacccacacgaacaacatagctttttgacactcaaaaaattcaaagtgctgcacaagctgttctacaaagttcatttcttctgccagagaaacagcccagtctctgtggcacccagtctgaccctggagatggtttatcagggaaatcaacttcctgcatcccaaactggcctccctggcactgatgtgcttgtcgaggtgcagctttggggagcaggaggcaattctgttgccatggaaacctctggccttaccccgagacgaaacctatcatttcagcacatcactggccagggtctaaagagctccttgatggggtaagcggaagacggggttgaacgctttgagtttggtcttctgttcctttggccagctgtctcaaggttcagattgttcacctgtaaaatggaactagcactgcctgcccagccttagctcagctccaggctgtgcagcagaagtacagggacagatggcgacctggggttgacaatgcccaggacagcagtaattgtgccccacatcaggctgtgtctaagcattgtacataaacgatctcattcagtgctcacaaaagctcaatgggctggtggcattgtcttcccccttcacggggtaagaagctgaggcctagagaggtaaggccattcacccacacagcggtagcaggtggagctaggcttcaggcccaggccgagccctgagcctgccctcttaactgttccactctgttccccgccacagggacctgcagcagctggatgacaccacccagcttccacttctctcacactttgccgaaaccgtagaaggactcaccaccatccgggccttcaggtacgagtccacattcccccaaggtaggagtggaacaggggtggggccagggggcacaggccatgagatttgattctcaggactccacttgggaaggccaaggacacgttctctctcaagctgcctcaggtcccaaggcccaagggatatccaccagcagggacaggccaggtgggctcccactgaatgttctagagaggaaaattccagctctgtagacaagcccaggacctctgtgaggcagagcatgaaaagagacaaagctgggacaagtcttcatgtatcaacgctagaaagggccttaggtgcgggccaccctaagcccttcttttattaaggagcccctgtgtgccaaacactatgctgagtactgtacaggccaatcccactcattctgcactgcaaccctcggtgctgagaatggtcatttccattgcacagacaaggaaactgaggcacagagacgttctataacctctctgtgtaaggtgccacaaagcccagacttgaacctatttgttcatgcaacaaacatttactaagccccgactatgtgctaagccccatgccaggcactaaaaagatgagtcaaataagccgctgccctgcaggcgtttacagcccagactttgagcaggccaggataaatccacgtgacaagtattctgaaaaaagcggattcaagggctgtgggagcatagaagagagacagtccgggaaggtttttgtaccagaggtgtcatcagaactaggactcaaaggaggggcaggagttcaccaggctgaggaattcctgaaaacttcagtgcccctgccatcgtctcactaccctgagtggtgatgttggggtggacaggagcatctgaggttgcctggggaatgagggaagctgttgtttcccactccccaagagtctgtctgatctccagaggcatctctcttccagtcaggcaggccagagacccctgacacacaaagttgggctcttttctcatcttcatccagagagtgataataggttatttttagggtggcacagctgcacgaagtatgacagtaaccatgagacaccaagcactgtgtccaggagtaaccatagggcacaaggaccagccaagggccagagaggcttacatctcctccccccaacccctgaagtccagcttcagccctggagaggtatccaggcccctctgcccaccctggagcacctagggccagtggaaatccacctcttagggatcttgtctaagtaaagaagagcagagcaaagctctgccctggccttggcgctgctccctggacatcccttgcccctggacaagcctatgctgtgtcttccacaaagaagcttgctggggactggattatgactctagagtctcctcccagcctcctcttctcaagcctgaacttctcccgttccttcaacttccaggtccctcgacattactgagcctagcctttgctctaagttttggtgatttccctctctcaattggtgtctcagagggccctggggtagagagatggtgactcttctagagtgggccacagccccttgtgtgcagatcccagcttcctgtaaacagcctcagatcaggccaaacctgtggtcagccagagccactgctacccagtgaggtcttccacaccctactgacacggtgaatgatttttaaatttgaatgaaaggctttttaatcaaccccatacacatttaatgcattggctttaatccagcagcctgttgagagctattagcacttattgattgcccacttactgtatgccaggcaccgtgctaagtgttgtatgtgcattattacatttaatcctcacaaggaccacataacataggtacgaatcgccacattctccagatgcagaagcgagacccagagaggctgggtaatcaatccaaggtcacacagactgcgggggctggcgctgagcttggaacccaggtttgcctgaccttctgggctttcctaagagatcttattttttcccaaaagagtttcaagagtgcccagcactgggctcagtggcgggctcggaggttgttttcgttcatgtaggaactatcacttccccatttttttcataagaaaactgagtctcagtcctgatacacagccaggaagttgtgatgttcaggctccaacctgggtttacatggctccgaggctggggctcttttctagtcctcagacacactgtcgcacgcctgtggcagaagctcccatctcacacttgccgaccctcaactcacacagtcctgagacccacatacgctgagcgcctcacactcctataacacgcacatgccctgatgcacacacattttcaacacgcacttactctacccttcaggcatggtttcacactcactgcagacacgtcaccctcccacacgtctccaccctgggggtgtgcagtagcatgctctctcccacctcagaacctcccttcagtcccctcagacacatgccctctctccacgcagagacaatcaaagctgaactaacaccttccagggtgaaaagcaaatgcccagtaaggtacgtcttgggtgcctccgtgtcccctgagtttggtcctatcaaaccagcgatgatgaggcagcttttctttcgttccttcctccatcatcaaacaagtgctcctgcatctcctctgggccgggcctacgtcagcaaggtctgagggaagcggccaaggagagtgatgacggcagcccaggttgatcagagaaaggaggcaggtccatgcgcagtaactcagggaaaacatgatgaggacctaaggatgagaaagaagcctccagagttccctgtgcagagagattccatcaatttcagagggtcaggggagtgccatgcattcatccaacaaatatttattgatagtgccaggtgctggggtatattggtgaataaaacatcttcatggaatttgcagtctattgagggagatgattataaatagctagagaaatgcatgtacagcagatactgtggagcaaacaggttgcagacaataataggggaaacctactttatagtaaggtagtagccaggaagagcctctctgaggaggcagcatttaaggcaagccctgaaggttgagttgagccagccttatgaagagcaagggcaaaagccttccaggaaaagggaatagtgtgtgcaaaggccctggggtagggaagactttagtattgtcacagagcttttaaaaagctgagtggctgcagcatagtgtgtggggtgtttgtggcaggaattaggttggcaggagggggttcttcatcctataagcagtggaaggtcattaatattcttttttatttgtttttttttttttttttttttttttttttgaggcagagtctcactttgtcacccaggctggagtgcagtgaggtgatcttggctcactgcaacctccacctcccgggttcaagcaattatcctggcttcctcagcctcccaagtagctgggattacaggtgtgcaccaccatgcccagctactaatttttgtattattagtagagacagaattccaccatgttggccaggctggtcttgaactcttgacctcaggtgatccgcccgcctcagcctcccaaagtgctgggattacaggggtgagtcaccgcatccggccggagatcattaatattctaaacagtgggggagaggacacagtttgcgatttagatagattaagccagccactgtgtggagcatggactgtagggagacagcaggtagacgtattcaggaagctgatgcagtagtccaggtgagagtttgtggtgggcaggaagcaggatagagggggagggaggcaaggactcttttagagagagacataagaggacttgccaaggggctgaatgtgaatccaggtgattcctgggtgagaaactgggtaaagggaggtgccccttattataatgggaaagacctagagaaaatggatcttggggtgaaaacaagagtttggaggaggtggggattctggacaggtttgaataagcagaaaggagtggggtggacattccagagagggatagcttacatgaagtggccacggtggcatgtctggggactggaggggccctggagcctccctctgcaggtagggagactcctaggagctatgtggaccaacactgttcccttaggagcttctcatcctccctccaggtatgaggcccggttccagcagaagcttctcgaatacacagactccaacaacattgcttccctcttcctcacagctgccaacagatggctggaagtccgaatggcaagtgctattcccctctaccctggcctctgataggagggtggggccagagcaagagcacacaggtacctggggatgaaagagaggataggataccagatcgtgtggacaccaagccttcctgcttcccccagccctggtggtcctcctagtgtctagcctgtgctccttttccccatatcactgcctggaggcttgtgtatctgaggtgtgtgccagtggcaagaacagttgtggtgaatgtgtatctgcagtgggtcatatgacacccacattgtgtgtgtttgtgggccagctgaggcgtgcatgttaaagggtgtgcaggggctagggggtaggggagcatgagcttgtgggacatgttggctcctggggctccagccttcgcagcccttgtgtgtgtctggtgacgtgtgcatgagttgcagggctggagtggaggcctggctgagctgctctctgccccgaaaaggagtgaggtagaacaggggcctgtggctctaacccctgagcgcccaggtcagctcctctccctccccaggagtacatcggtgcatgtgtggtgctcatcgcagcggtgacctccatctccaactccctgcacagggagctctctgctggcctggtgggcctgggccttacctacgccctaatggtgagcggcagtgggctagggcagaggaggggtcagacaccagcactcccggagcaccttcgtcactggagacatgagacactcccaggccttaccccaatttcatttgcatctgatgccagagggacagtgcgggcaggaaggctgaccagcaggccccagggcccaggccccagacaggtggaggttggggagccacatgactgaccctccctgtgcctccagggagggctgctctgagcaggcagtggatggcagcaaaaggaatctggggccctggcccctctccagccttaagaagagccattctggtggctgaggacagaactaagcgaccatggagtgtgcgccactggcttgctccccacaggtctccaactacctcaactggatggtgaggaacctggcagacatggagctccagctgggggctgtgaagcgcatccatgggctcctgaaaaccgaggcagagagctacgaggggctcctgggtgagaggctcagggagaggggtggggaagagtccaaggaggagtgtgtctgggttgggggccacaagggagcctggggatggggtggcactttcggatactagctgtggcccatgcctggtggctgagcccagcccggcccccagcaccatcgctgatcccaaagaactggccagaccaagggaagatccagatccagaacctgagcgtgcgctacgacagctccctgaagccggtgctgaagcacgtcaatgccctcatcgcccctggacagaaggtcagagcacgggcccaacccaatgctgcaggacaggcgtgagcaggggatggggcatgcacggagctggatggcttcgcagtcacctcgtggccctccagggccgaggcctctcactattcagacatcgcagtctcctgccctgggcctgtgggggcccatctttcctctccttctattgccttcccccagtgctgccctcaggccttgtcttctcactcatccaccaaggagaccgacactctggactcccccagctcacacgggctttgtcagggcctccctctctgcgaatggtcaggggctttccctagggcactgccccgagcttcagggcagggacctgggggcagacagcgaggccacccttgtattgagggtgagcccctgcctatggccctggcccagctctcctctcgtttcccactctgtctctttgtctctgtctcactttgctgtggctgtccatgtcattctctgaccttgggatgtacctctgtccctgcctctctcatccttctatgtcactatctgtctccgtattgtaatttctgttggtacccaagtgccaggaagcaacgggatcagaggtggctccattgtagggcggggcacacagacacatccatgcataccactctcagctgcccctgtgtcctcctgccacacccatgcccatagagacacaccactgccccccagctctccttcagccaagtacccggcacacccagacccacaccaaggcccaggcaaatggacatccatgcctgcacttgcgtgccggtccctgtgtaagccctctctggacccactgcaggaaacaagcccaaacctgtggtgtccaaagagaaactagtcagaaaaccaggccaaaaagataccctgtgacctcccacacctgcacacacacccagagctagcatagaggctattcccagcagccccagagtcccagtggcggtgcctgcttctctctttccagatcgggatctgcggccgcaccggcagtgggaagtcctccttctctcttgccttcttccgcatggtggacacgttcgaaggtgagttgtaaggcgggcaccccacgtgtacccacagccaccagatgaggcctcagccctggcacgtggtcagacatgacaggaggcccagcagtcaccgccttcccctgcaccctcactgggacccatgcagggcacatcatcattgatggcattgacatcgccaaactgccgctgcacaccctgcgctcacgcctctccatcatcctgcaggaccccgtcctcttcagcggcaccatccggtgagccccaccacccctcaggcccacccagccccaggccggctcagttccatcagatctggagcacaaagaggagggggttgggggagaccaggatcccagaggtgtttcctgctcatgcccttctccatcccatcaggcccaggcagcctctggaaggggatcccccacccatgggtctaagatgctgtcccccacccactgccaccacctcggtgcttctcccagccagacctccaactcagtctgctctcgctcactgccctctttgccgcctggggatgcaggcaggaccctgctccctccctactggggctttctgtgccacttccagatttaacctggaccctgagaggaagtgctcagatagcacactgtgggaggccctggaaatcgcccagctgaagctggtggtgaaggcactgccaggaggcctcggtaactactcctggctatgcagctgggttggttgggcactcaaggaccctgtaaggatggcagacagaagcccgtgtctcaggtttgccccaagtttggagtctgaagcctggcaggaccatttagtcctacttctcactatacgggggcccagagaggtcaggtgtcttgccccaggtcacacaactggtcagttcagggtctggctcctcctgcagggtacagcgggtacagtcagggatccttgtgagacagagattgcgagtcccccatgccaagggggcatcttcagccctgccctgccccatccacctgcatgcccagttctgccttaggggaggagaagatggactgggcaatcatagacacgggtcactcatcaaggccaccggtgattggcaaagccttggtatatttgctgcagctcctggagcattgggggtggccaagccttggtttcaatgaatcaccctaccaaggccctacatacacactcagtgcacccctcagtgcacacgccccctcccagaactgcccagggccacagcagcacacacctccaggggtgcccttctcgttgcagtccttgcagacggcctccacattgttgtgtcaggtgcaccagccctgcacacgcctgtgctcttggacacacacccacctatttgcccccatgcacacattttccaacagccccccaagccatcccatctgctccactcacagcacaagattaactcagtcctacttcatctccccgggctgttttcagatgccatcatcacagaaggcggggagaatttcagccagggacagaggcagctgttctgcctggcccgggccttcgtgaggaagaccagcatcttcatcatggacgaggccacggcttccattgacatggccacggttggtcctgggcccctccatgggaccatggtcttggaaagggtttagtgggatgctagggagaaatttgcacgaagtagtcctgaggctcaagttgcctctaacatcaaatgctatgtgttgcagaaaatgaaaagagctggggggaccctgactctgtctagtcttagggaatgttacacacacacacgcacacacaaaaacactatgcaaacacacacataagctgcacacacagacccacacagacttcacactgtcacctatcacaacagcacacacacagccacaaccacaacctacatacacacacagagctgagctcccaacaggctgagtccagtccctgagtgccgggaacctgttcagtcctgtggggtgggggtgggactaggatcggggtcagatgggagctgagccacagacctgggctccacatcccccaagccaggccagaccccatccactgggcaggtgagccaacagctgttgcccccacttggcaggaaaacatcctccaaaaggtggtgatgacagccttcgcagaccgcactgtggtcaccatcgcggtaaggggcccattgatggggtgcagagggacacccagggacaggactggcctgttgtggccgtcatcagtgcacagcccctgggcttgcctggtcccagtaatcaagaaagaaccctgaagcaggcagttcagggcaaggggcctggagggcatgcagggagcctgggttgcaggatttggggtggggggttttgcccctgtgcttccctcagacctcccctctccttctccaggttccaaggcctgcccctgtcccaaggccttatatgttaggctggcgttacttctccataggaagtgggggaggggttgtggagggtctctgagccttgaagcctggaggtggggtagagttgggacttggagaggagagaagggtggtattagcagatggagagcttgtagtcacatccaccccaggaaagtgcagtccccacagtgacaggacattctggccacatgcctcatcctcctcctccaagccgcaggagggccaccctcagctgtggcccccaccgcgggtggtattcccaccatcctgacccgccccctcctgccctgcccagcatcgagtgcacaccatcctgagtgcagacctggtgatcgtcctgaagcggggtgccatccttgagttcgataagccagagaagctgctcagccggaaggacagcgtcttcgcctccttcgtccgtgcagacaagtgacctgccagagcccaagtgccatcccacattcggaccctgcccatacccctgcctgggttttcta

SEQ ID NO: 15331 - DNA, 83773 bp, Homo sapiens
aagggacagaggcgcggcaggcgcgcggagccagcggagccagctgagcccgagcccagcccgcgcccgcgccgccatgcccctggccttctgcggcagcgagaaccactcggccgcctaccgggtggaccagggggtcctcaacaacggctgctttgtggacgcgctcaacgtggtgccgcacgtcttcctactcttcatcaccttccccatcctcttcattggtgagtgcgcgcagcgagccgcggaggaggggacgggagagcagggagggaggaggaggcgctgcgcgccgcaccgctcggcgtccccttccggcccgcgaccgccgtccgcctcgttcccggggtcccctgccctgtgtcctgcccgccggtccccgcactcgcacaccagctcatcccttcactcccccggtgcccccgatcccgcgccaaacacagcggacgtttgtgacccatgggatcaccaagttttgcttctgcagggccaagagctgggatggggaaaagggaaagaggaggtctcagcacgcagtgggaaactggagaggggtcgggcctcaccctccgtggcgcagcttagggagccgggtcacccctcccgcaaggcagcctccctgtcagccgcagctgggcctagggaagagggaagcctgtgctttggagtctgggatggaggcccagctaacccctatgctttcaccgggctgagccgcgcagtggtccgtgatctctgacagtcccaggcccgcgccctgggcgaggagaggcgagagctagggacttggattcccttcccccgccaccccacccgggcatgtgtctccagagcgcaacttctcaggctctgcgcaaagtagctccgactcgccgacgcagcgaccccggcgcccttgcttgcaaagttgggcgccacggccgggacaatcgtgcgtgcctctccactgaggtcccccccatctctctccaagaccttgactcttccagaccagtcaagtctatcaactcatagggtgtcccctgcatccccaaaacgtgttcattcactttaagaaaacaagcaaatcttaaaattcatatacagctttggggaagaaaggaaagattgtcacaaaattagatttacaagaggttgctgcagaagcagagttgctagttattaacaaagacagttagatagaaatagaaataaaacatacaaaatatgtgctcatatgtgcatcaaaaatcaaaaaagaacagcatttacacttctgttctcagccaaacggtttattaacctgatgacttgtcacacaagaagttagtatgtataatggggtaccttggcagggcacagtggcttacatctgtaatctcagcattttggtgggctgtgacaggaagactgcttgagtccaggagttcgagaccagcctgggcaacatagtgagaccccccccgccctttctacaaaaaattaaaaattagctgagcatggtgatgtgcgcctgtagtcccagctactcaggaggctgaggcgggaggatcacttgagcctaggagatcaaggctgtagtgagccgtgatcgtggcactgcactccagcagaggcaacagagcaagaccctgtctcagtaaaaaggtgtggtgggggaggtaccagcataggaccaggctgaatgagttggacgtttagtttgtgtgtaccagccttggggatcctcatgtgtaggtgtcaccctcaccatggacccaatgcccaagcacctttctggggttcatgcaccctcttcctcctccaagtgggcaggcatcctgcctctgactgtctctccctgcaggatggggaagtcagagctccaaggtgcacatccaccacagcacatggcttcatttccctgggcacaacctgcggtggatcctgaccttcatgctgctcttcgtcctggtgtgtgagattgcagagggcatcctgtctgatgggtgagtgactgtctgaggactcaggaaagtgaatctgctccagggtacttcctgaaaggcccaaggagatcctagctcacctatattccacaagcccatgtcttttgttactacatccagcagctcagtgtcttctatgtgccaacctctctgagctgggcactggacgcaagtgagtcccaggccctgccatcagtccaggagagcagagggaacacggacctgcatgccaagtcccagtgaaataatgctagagcctattagaatgccacaactccagtgaaaaatgtctggcctcttctacaacctgccggagttaccttcttggaaaaaaaaaaaaatctaaccatgccacccactcttgcataagacctttccttggttctcagctgttttgaagatgtggtctcagatcctcagcccaccattcaaggtcttcacagtcagccccacctatctctggcctcattccccatgcccaccttccgtttgggcctcacagcacactcctcacacctctgctacagcacagatcacactgtatgttaaagtttatgtctatttgcaaaactgtcttcagagtcagaaaggcctaagagttagaatctgagtcttgttcatctttgtgttcacagtgcaaggcatgtgataaacataaacattattcagtccataaacatttattgggtccttaggagaatgaatgaaaccatgttacaaataagtactctgggaggtgagaggaaggcagaattgggcaagctccatggttgagagggctttggagcggagtctggaagggtgactaggcttcagacacacagaggaggaaggagagagagaactggtggtgcctgagggaagggaaaaggcaccaaagagaaaagcaggtagggctagggagcagcgcaggggctggagcattaaacacaggctggggagcgatggaggctgaggctgggaacccaggttggggcatctcaggaggactgtgaatcccagcctgcatgtttgggtcggatttggtcagcagtttggaacagaagagagatgtcatcagcataacacttttaggtgggaacctgaggtgttcagcgcaggctggaggcagggagaatctagaggtataatagaagcaggacttagcattgactgcagtagtctaggtgagcaataactgcagacagaaatggtgtgtcagcagtcagggacagaagaggagcgggagcagccatctcactaaggaagaatccagtaaccagcaaggatgagagactgccaggagagggagtggtggaggagagggatatttggcttgagtatctgaggtccagcgccccctgagctggaatcagattatacccagactgcactcctgcagtgctgcctggctcctgtagttggatggcaggggataggctccctcatcctccctcccgttccccaccttcccttccccaatgtccctgcatcctggcttcagcagtgatctctaaaatacctgcttgacttggaggcagcagctctgcctgcttattaaagtccctagaccagcaagaagaccagaaggcatactgctacacaagcacgtgacaagtccgcctccacccccacccctacaccccttccaaagtagcacaaatgccacagtgagccctcagatgggaaatactcaccagatggtgacagagaaagacacctccgcccttggagaaggaagacctgggtcttcagtgagcactgctgctgtgtaccagctatgggactttgcacaagtcattcaggctttctgggcctcataagcatttataaacatacgataaaacattttagttgccaacttaaaaatgtgtgagaaagtataaggtgtttcaaaattatttcaaggagtaaagaggcaagagttttgaagatccctgggcagggtgttggctgttcccagtgtggccattcatgactgctctctggccttatgaaacaagcatcatagtccctggcttgcctgcttcatggggctgtggagggtgaaattcgagcatggacagggtgcagagcccggagtggcagagcactgggtagactgtgtattcccagaatgtgggaaactggaatgaatcggtccagggatgccctcctgctggctgtcagcagcccctcctgtgtgtggctgtactgcttcagctcagtgcaaagggccatctcctccccagggcacagatcagctcaagctgagtaattgtcatctggtctttgtgagctcctacccccaggcctgagtgaggggcaggaaaagagcagacaggagaagtcacagacccttgtgatacctccagtctaatccagcctgggttttcagagctgtctggaaatttagggggcaggtgggagggggctgattaaggcagccctgatttgatttagagtgagcctcatttagtgactaattaagccatcttaaacctgtagggcttcccctcttcctttgggtattatttctttctgtgatgttctgaattcagaacaatcaaaacagtataagttagtgaagaagatattttttaataactacaatattttcccagaccaccatacactggataaagcctgtatataaaactttacctaatttcttaactaattgaatgtgtattatttaacaaagcagctaaaaactattctatgaagccatgtcatgaaatatttagttcaattatggttaatcctcatcttatttcgtcttataaaattttaacatttctacctcctattgcaaaaaaaagcatttatatcagcatataataaaacatgtctagatgtcagcttaaaaatgtgtgagagagtagagggtgtttcaaaattatttcaaggagtaaagaggcaagagttttgaagatccccaggaagggtgttggctgtgcccagtgttgccattcatgactgctctctggccttgtctgtcttgtaccttctatattagtttgaagaccttttttggagaatattcactaaagaatatcaatatctaccatttcattaaaaaagaaatgtggagtttgccttttcaagttggtttgatgcttattgatgttttcagggacccagcctcttcccatctttccataccatcctgtgtgtgtgtgtcagcctatcttccccatggtcacaaggtggctgcctagctccgggtattgcttagcatgagcagagagggcatgctgccgacatgcctctcctttatgacagagatcattctttctttgacatctcactggccagaatacgtggaccaacactggcaaaggagtatggaattgcatggctgcttaaaccaatcaccatccattccctggggctgggtatattgctgctggagcaaacctgtggtcctcctggcacagaataaggggaagatactctttggtggacagcccacattgcctctacacttgcacctcagtcccaccagacccactgaggtcacaggatagctctcctcatgtccttcctccttctctgttgaactcttatgtatccttcaaagtccagcctggtgccacctcctctgggaagctgtccttggttgcccaccccctcctttgtgctctctcagtctctgtccatcggcagtatcacttccctagcctgctgactccaacagttagctctgagcatggcagccccctccataccatcagcttctcaagggcagggacccttggcacactggatagaagtagcctggtgggcaacagcagcactgaggcagcaagctgtagcaggccatctgggaatggagtgggtaccacagggctggagcagaaagggcaggctgggcagatctgataaagtggctggaggccacatagcctgggcctttcgttccaggctgagcagagtgggttttgctgtctgcaggagggagctgtggaagggcatgatcacgaccaactaaggtgaccctcctcaccaggcccagggaagactgaggcctggaaggaggctctggctgcctctgggtcttacccccaggccacagtccacccacttagaggcctctgtgagttaaggtggagagactatgagctggtattgactgctccattccccatcccgagagaggagacaaaatcagtgaccttggaaatgcctcttcgtgcctcagtttcctcaccccataaaatgggagactaagagtacccactcgatggggtttaatgaagattaaatgggttaacatatatcgcatgcttagaacagtgcctggcacagagtaaatgctccataaatactgactctcatcagtttgttatcacagcctctggggagggcgccagtgctgacttatgctgttcgtgttaaatggggctgtcactgggtgagttgtggcatacaggcccctgcactgttcaagagaccccagcaacccttgtgcttagggctcagcacatagtaaggcctccagatcatatacccagctctactccatgtactggcagctctgcccagcccataccccaaatacgcccattaactaaagggccctgcagcctataaagtgatgctataaaggttcagtgttcagcctttgaaattcaaggcctgggctgctctattgcagtacttagcatgtccccatcctgtctgtttctctctcccatctcagggtgaccgaatcccaccatctgcacctgtacatgccagccgggatggcgttcatggctgctgtcacctccgtggtctactatcacaacatcgagacttccaacttccccaagctgctaattggtaggtgaggtgtaggagggaggggcagtaccttcattcatttcttcagataatgtttactgaggactcattatgtgccagctattgctctaaacagtagagatttggaatagaaaaagaaaaaaatccctgccttcatggagcttacagtctggtgaaggaggatagacaggcaaagacagtgaataaacaagcaaacaaataggtggtggggatgctatgaagaaaatcaagctgagtaaggggtaggggcaatgacaatgttgctatctacacaggatggtcagggaagggctgtggtaactgtgggcatgcagatatttgggggaaggtattccctgcaaggggagtgacaagtgcaaagtcctctgatagggatagatttggcaaagatgtcactgtgggcaaagccaaatgagcaaggggaagagtgggaggtgagggcaggcgtcaggagaggagcgagcaagagtcccaggctctgggcctgagagcctgggtgaactgtggcatcaataactgatgtgacagaggagggggaggtgggctgtggtggggataaagttttctactgggggcatatcgagtttgagatgtcacagagacagccaactcaagtgtcaagttgggctttcatggggaggtcaggacaggagctacactttcaggaggtgggccttgtagatgacatctaaagcttgagcctggggctggctgccgtggctcacacctgtaaccccagcactttgggaggccgaggtgggcggatcacccgaggtcaggagtttgagaccagcctgaccaacatggagaaacccccacctctactaaaaatagaaaaattagctgggcatggtggcacgcatcggtggtcccaggtactcaggaggctgaggcagtcaaatctcttgaacccaggaggtggagattgtagtgagctgagatcgcgccactgcagtccagcctgggtgacagagcaagactccatctagaaggaaggaaggaaggaaggaaggagggagggagggaagggagggagggaggagggagggagaagaaagcttgagcctggatgaggtcacctggggagagaagagaaaggctctgggaccagagcttgaggtttgctaacatttagagagactcgggaaggactgcccacttagagcttctgagatgttaaatactgcaggactggggtcccaggcagaagcaacaggatgatggttggtgtttactgagcatgtgccatggggcaggctccatgccatgttccttacattcattgtcccacaggctaattcccccagcctccttattggtattgttaatatccccattttccagtgtggaccctgaaactgagaggttaaaaataataacagtaaatactcactttgtacttactgtatgccaggccccatcctacctatgtgatatattaattcatttaatccttgcaacaactctatgaggtaggtaccattattattttccctttacatatcagaaaactgaggctcagaggttaaataactggcactagtctagctcgtcaaggggcacagccgggagtctagcatctgtgcaatctcctaatcatttctgagactgcgtgtctaagggccctcagacttcgtccttggggtaaaggtatcaatccgcaggtctgcctctgtgttggggttcagcctgtgtgtctaaggctggggctgtacatctggcagttagactttgttcacactatgtccttaagtcagactgatttttaggtatcacagcatcgaattgacatttggagtctggcacactctgtgctaagccagtgacatcatggtgttgtcagggagtacagggtgtttcttgcactagtcacaggtctgcctttctgtagaaggtgggatctgagctccattaggattatccaggtgatccccctacccctagcccaggggcccccacatgagtatgaatgggagctgggggaagcaggttgagaggggagatgttaaatacaggcttcagagagccaccctgcttccatttctgaagtagctccttgtctgtagagaacccttcattaaccagggcctggctgaccagtgtcctctggaaacaccctgtctggacatctgaggagttcattttctcattctccagcaaacacataatgttctctctttaaagcacaagttatcacccgtggatggatttgtccttttctaaggaacaaagactaactccctccattccccttgttggagttatctccccttgaaaggacactccacagagccagaaattctagaacagggaaaagtggaggggacgtgcctgtgaactgcagggacagaaggaaatgggtattgggagaatggccagccctccaaggggctgatgtctggcctgggtatggagtcccacagaaaggggacctgtgatgcagcttacattgtcccgtgagggaaccatgatcctggaacccagatgaggccaaggaaatgttctctgaaaaagtcatatttgagctgagaactgaaggaactaactgggagaagggaggaaagagtgcttcaggcagaggaaacagcatgtgcaaaggccccaaggcagaaggaacaaaacacattagaaaattcagaagaagaagagtggcgtgggtgcaaagtggaggggagctggactttgggttttgtttgcttgtgcccaggctggagtgcagtggcaccaccttgggtcactacaacctccgcttcctgggttcaagcggattcttgtgcctcagcctgctgagtagctgggaatacaggcgtgtaccaccacactcagataattttttgtatttttagaagagttgggatttcaccctgttgaccatgctggtcttgaactcctggccttaagtgatcaggtctcaacttcccaaagtgttgggattacagccgtgagccaccgcacccacctggaaggtcataccacagatgtttgcctttatcccaacagcaatgggaagttgtgtgtgtgtgtgtgtgtgtgtgtgtgtgtgtgtgtgtgtgtggtttaacatgtttaacataaaatttatcatcttaactgtttttaagtatagtgttctgtggcattaagtatattcacagccgggcatggtggctcatgcctgtaatcccagcaccttggcaggccaaggcaggtgaattgcttgagctcagaagttcgagaccagcctggccaacatgccaaaaccccgtctctacaaaaaacataaaaattagctgggcgtggtaatgtacacctgtagttccagctacttgggaggctgaggtgggagtatcatgggaggctgaggagagaggatcagttgagcctggaaagtggaggctacagtgagccaagattgtgccactgcactccagccaagattgtgccactgcactccagcctggacaacagagtgagaccctgtctcaaaaaaagaaaaaaaaagtatattcacagtgctgtgtagccatcaccactatccatctccagaactttttcatcttcccaggttgaaactctgtactcattaaatgataactccccatttctccctccttacagcccctgacgaccaccattctactttctatctatgaatttgagcactctaggtacctcatctaagcggcatcatgcactgtctttttttttttttttttttttgagatggagtcttgctctgttgcccaggttggagtgcagtggtgcaatctcggctcaccgcaacctctgcttctctggttcaagcgattctcctgcctcagcctcctgagtaactgggactataggtacctgccaccacgcctggctaatttttgtatttttagtagagacggggtttcaccatattggctaggctggtctcaaactcctgatcttgtgatctgcccacctcggcctcccaaagtgctcggattacaggcgagagccaccttgcctggcctatttgtctttttatgacttgcttatttcactgagcataatgtcctcaaggttcatccatgttgtagcatgtattgaaatttccttcctttttaaggctaatattctactgtatggatatgccacattttgtttatctattcgtctgtcagtgggttgcttccacctcttgactcttgtaaatagcactgctatgaacatgggtgcattgaggggttttcgacataatcataataattgctttatggagaccagcttggaggagaacaagatggggaggaagtgtggaaaccaatgagaaggctctcagggtatagcgggaatacagaggacgcatgatgatgcctggacttaggtggtaccacagggatggagagaagtagatagagtcaagctatttaggacgtgaaatagacagcatttgttaatgggagaggtgtggggcgagggagaagaatagagggagaaggaggagtaatgggagctcaccagcagcccccatgttatgcctctttccttccttttccctcttctctcatcaggcattcagcttttgctgagtacttctgtgtctgacaacaggctgagcactcagcactgcaggacaggactatgcaaaaaacctctgggcctagtcctgggtgcactgctaattccctgtgtgaccttgcacaagacatccaagctctctgagcctcggattccccacctgggcaggaagagtaagtccctgcctaagtcatagggttgtaatgaagagcaaagcagaccatatctgttaagtgttagggacaagacaagcatgaggcatattttcaagtctcggctcctgtaggcagctctcactaagggctaaagggcttctgatgcctgggatagaatctgtccggcagagtggagtggaggcagggggacagccttcagctgtggaattcctccagtcctagagaccagcctgagctgggggacattattccagtcctgaggcatgagagcagaaggccgatgcttctgccctccatcctaatgtcctcctgcagggacccaaggtggatggcatcgatccccccgggtgagctcagccctgggcgcatggtggggcccaacatctcaacctgtttcctaaccctgagccaggcaggacagatcccagatttgtgcccaagagatgctctggcatccatgcccaggcccacatagggatagagggcagggtgaaagtctctctccctcactcgggtcctctggagaggggctctgtgtcatgaagctgaccttatccgcatctggtctaggagggaggagggaaggagctgccagtgctaaaatctcccccaccctcaaagggggacttcacaggttattgctggttttggttgttggaagctgacagtgatttattggcagattgaagtgagtgtgtgtgcgagaatttaggatagaatctactgatagcttctgaggtttaccttccccaggtcttaaatctggagataataaaaatataacagctaatgtccaaagagcacccgctgcgtgtgaggctcactgcactaaatgctttccatatgtttctcacaagaaccttctaggtagcactattatgattcccacttaatggatgaggaaactaagctctagaaggctaagtgactaatccaaggtcacacagctattatgtcacaggctctgagcccaggtgtatctggctgcggagccaccaccactaacccctgtataacgctgcctcacagaactgtggctggctctttccgtatcccccatgcccctgctccatcatcatgctgtggtgggctctgaactgtgaggacagggatccaggctttcaccctctctctgtccctagctgccagtgcacttgggcaaggtcacatcctatttctgggcctcagtttcctcatctgtaaaatgaaaggctggattgaatgacctttaagatttccctcacttggaaattccacaagtaagtcattatagcatggagcttgcatgcatgggctccagcgtcaggccagcccagctctgccagttaatgggtgtgtggccttggatctgttacctaacctttctgagcctcatttcctttgtctgagaaattgggggtgacggcagtgtactttctttgaaaagttatggtgaggaatagataagatcatgtgtttaaagtgcttacttggcacagtgcctgtaacttagttaaattcaataaataaatttcccattcttcccatgatcatttatttttaagggacatttgtctgaccagtttgatttatgagattattggtgtttttcatgaatgttaagacgtacgtgcgtcatcttagagtcatgtactctgatatattcacacgtgcacatccacttactcggaaatgtacacacccaggcacgcttattctgtctccttctctgccacatacttgcacacattatgtgagtgtacacacatgatgcacacacgtctctgcgatcttccatctctcctcggcagccctgctggtgtattggaccctggccttcatcaccaagaccatcaagtttgtcaagttcttggaccacgccatcggcttctcgcagctacgcttctgcctcacagggctgctggtgatcctctatgggatgctgctcctcgtggaggtcaatgtcatcagggtgagggtaagcaggccacctgggccagggtggggtgggaagcagaggctctggcctctgtcctgccctgggttcaggcccccaccctgcttctcagccaaactgagaagggatcagcttgttttacccgcccgtgtaaaggggagtggggccgtggcggaaatttcaggatagacactgcatctggcccacgtgtgctctaccccagggtcccagagggagaggggggtgatgggtgtgttcgctgaggttggcggatgactttccgtagaaagggaagataagcatcaggcactggcctctcctactttctttcttcgggggtgggggactttgctttaatgtattcatatcgtcacgctggtaaatgaatgagtaagtgttttgttttcctttctgtttgctcccgcctccctctctcttcctcaccccagactccaaccttccccttcccctgcccctacctccccaggcagcccagactaatgaactcgtttgtctttcccatgctttgtttttattagtataataccatatgtgtctgtctaaataaatacctattcaggttttttcctctcaacacaagtgaatatgtaggtttcccccacggtatttatcttgtaagaatgggatcatattatgcagttttctgcactgtgcttttctcacccaacaaatatctcttgggactccctccaagccatctgatatggctaattccgttttcttaatggctgcataatattccatcgtatggatgagccataatgtgttcagctatttctctatggatgggcatttactttgttgccaagttcttgccttcatgaataatggtgtgttgaacatacttatatatttatgtattgctgcttttatttctatgggagagagtccaaggaatggcgttgctgggtcaaagggtctgtgtattttaaattttgatcagtgttacatattgccttccagaaagactgtaatctgccagcaatgagtgagaaaaccctttccctgccttccaaccagcagtgagggctacagccctttcgaacttggactgcctgcatttctctgactcttctgcttttagttggtgatctgcagggcacaaagctccttatgtgtccccccatccagtgaccctcacaggaaccctgtgatgcaagcaccatcccctttatagatgaggaaacattttagatgaggcttgtccaaaaacaccttgctagtaagtggaggaggcaggattcaaaaccaggtctgcatgacttggagttctgtgaactgtatatgaaacatggtggtatccttagatctgtggagaagatagcatatgagagattcctgctcctccccaacccaacctaaacccaacccagcctagccatggggggttcaaagtcgacctcaatgagcagttacaaagtcaggatgccctgacattggtggccaagaagtgttggggaatccttttcctggtaataattacaggcgaaagatggccccatctgttagagatcaagtgtggaatatcacaaccccagatccttgctggggcaaggtagggagtggtgagaagttggacttacccatcccccatggcccatgtgccccacagagatacatcttcttcaagacaccgagggaggtgaagcctcccgaggacctgcaagacctgggggtacgcttcctgcagcccttcgtgaatctgctgtccaaaggcacctactggtggatgaacgccttcatcaagactgcccacaagaagcccatcgacttgcgagccatcgggaagctgcccatcgccatgagggccctcaccaactaccaacggctctgcgaggcctttgacgcccaggtggtcagtgggggcacagccacaccatctattcactgccttctggtttagggtcacagagagggacctcaaagggcattaggtcaaaatcctggtgggacaagaggggaaactgaggctggtgaggggaagaagcttgccttaagtcacacagtgaaccagggacaggtgcagggctgaggattcataggacaggcacagttggaatggcccttaccgtttaggtcgtctagtccaaagtccttatccagatggggaaactgaggctctgagaagggaagtgaccccactggactctcacatccctgtgctctttcctctgcagcttactgactataaaggttggagtgttcacttgatttggagcaggggtgttagtggcctgatccttatggtaactctatgagttgagccagacaggaatctccccatatcactgaggagcaaattgaggccctgagaaaggctgtgacctgcccagagctggccacagctggcaggcggcagaggcagtctcctggctcccagtccagtgctccttcacttcctctgccctcgcaccagggcagttgctgaggcagacacggtggcaggtggtaatgagtgagtgtggcacatggccacctcctcattccagtgctgtgctcatcacatagtccctgaccagctgtgtgaccttgagcaatcatctggccttagtttccccatctagaccatgttggtgttgatagggccctcccaactgtgcacttgctgattccatgatctcttcctggagttcacctatttgcagaggatgtgaccactgggtttccccagacaacaggagctaggggcatcctgggaggctaggcccagccgtgaattagccctcaggcactctgacctggccatggtctctctgggcagcggaaggacattcagggcactcaaggtgcccgggccatctggcaggcactcagccatgccttcgggaggcgcctggtcctcagcagcactttccgcatcttggccgacctgctgggcttcgccgggccactgtgcatctttgggatcgtggaccaccttgggaaggagaacgacgtcttccagcccaaggtaggcagccccaggggtagggtaaggcaccctctagatggttttcagttgtttctgagagtgcaacaggccaatgtgtgtgagccatggccacactggagtggctcctcacacatgcgcaaagcccatagcagtatccccaccacagaatactctacatctggtcaacagaaatgccagagggcgagcctatgccccaagggtatcctactctcctctcaccgtcactaccatagtacctctcccggtagttaggtcagtccgaaaactgcaggaagtgcttttgtttgtccagtgtctagagcttctgtgacttggatttgttggctttcagttcatgtcatcttagtaaactctttaaaagttttcaagatctgtcttcttcagtcctgtaaaggctggcacttgagctttctgcaggggcatcttgggagctactgtcagaggagagagaagtgggaaaccctcacgagtggagctttgtctctccccactccaaatttcattcaaagctgcccgtagttttattaatatgttggacttttccattaaaatttcttttttaagaaaagtttccatggcttaaaaaacactggagacttattagactagattatatccaatggccttggcagttgtaacgattctgcaaactgaaatttgttggagctagaaaacctttccccggggttatttgccctgcgtggggccgtagcatccacttcgggggctgggcagactgtgctctgttgtctgtttccttgcagccgtttaggtttaaatggccacaaaatgaaaactttttcacccctaataagtttcagagttttagtttccaagtgaggatgtcattataacattttaaccacagacagtctgaaaataatgcagagaatggggaattagggtttttaataatttatgacaccctttgcgtaacatttgttcatctcatgagctccaaaatcgcagccagcagttaatcctcaggaggtttatgttcatttttctggagacataattagtcagctgaacagttttggccacagatatgagatacgttgagtctgatttatgcagcaaactttcattgaacactgctgtgtgccaggcctgggttgggctgtgggaatatgaaagcaatagttatgatgaggatgattaacaatattaacagccacttactgaccacataatacatacctggctgtgtgcaggagttatccatgtgttatttaatccctaaaactatcctttggcgtgagtatattttgcaacatctttactgtggtatacctcaaatactgtacagtttatgagatgataggtattcttatccccattttacagatgagaaagttgaggctcagaaagtttaagtaattttccccagggtctctcagctagttaataacagaggcagaatttgaacacaagactcactccacagtctgggcatttacagccaggaagctaaattgactattattatcaagccatcacctctggctccaaggattatgaaatccaacagtgaggagagaaatcaaaataaaatacttttatgctatgtgttacatgtgactcttaggaggaatattcagggaattgtgggaaaagatagtgattaacttagccagtggtcatgaacagcttcatagaggaggggatgtttgaaaggggtcttgacggatgagtaggaatttgccaggctgccatgggaagatttcttgctcaaccaagaatgcaaggaccacttttgcttatttaaactttgatggcttttgaagccatatctggctttttgagcctctctactttacctggcccataaaagagaggggaagcggctgcttctcttgtctacaggagtgtcacctttggctctagcctgaccataggctaccccagaatacccccattggcgatcctgaagcagcatggagccagttgttaatatcagggggaaatggcacaggccagagcccttatcagagtgtccacaccacgctcttcttcctgtgtttcccaaaacccttgtgggattctgctaaggagagagctctgaggcaggacgtgccaaagagatggcgaaagcacttagaattttagttcatctgaacgttatcattgccgtttttttctctttgtttatacacaaaccctggggtttattaccgtctcattggaatgctcttgtcccagttacttagcacacaaatccctgagacagatggccctgcctcagtggcagtgggccttatcagatttaatattttttccctgcagcccaaacacaatcagaaaatttccgacacagaaacaagagttgaaagtaaatatagtctccagtgtccgcaacaaagaactctccatcatgtggttgcctgggatgtggcttaattctcatgtgggcttctgagctcagaaaatgggggaaagggatcatttactgagatcatttggttcatctcccagcccccaagccattctaatccagagagaaccgagtgctattctggtctttatgaatgacaaagaaggaagctccctagctacatgttgcagtgtttcacagtctgggagaggaagccgttttttctgcccagcctgaatccatcctgcagcagttggcacagcgaggcacctgtggtttattcatcatcactcttccttcctaagatactcagagttggcaagaaacatgtcatccttggtatccgcaaggacgaacatttctgatgtcctctttagttactgaaagtgtctgtgacttgccagatctttgatgctcctgtcaccccgctgccactccccagggaaagctgggacccaggttgggctctgcctatgatctatagctctttccagcctcctctccaacccaacccctactcccaatctgtcacctcccatggatgccactgatctggctgaaggacaagagaattagattcataatgagctgctggtgtctgaaacctgccagcactgccctgggctatcagttgagccaaaggaagaaggaacagtctgggtttgatcgaagggctaaagcttcaaacagcctctaagtctcagtaggaaaatgtgtaggtttgggagggtgtatgtgtttccgaatgagttcccctaagaactgcttatggttctatatgtgtgttctgtttgtccctgtgtcttttggtgtgtctttttctgcgtgtgtgtgtgcatgtgtgtgtgtctatgcccccgtttggattgccatatttgtggctatcattatgagtgacttaatgagtgtatatgcattggtgtttctgtgactttgtggttttgatgcatgggctggcctcttcataaccatgtccatgcagctggtctggcctagagtacctgccttcaattcactagctccttcttggccatcaagactctgctcaaatgtcacctgctccagggagccttcacctggttgaattagatgccccttatctgtgctcacataacatcctatcaaagcgccctgtttctttccctgacttgatcctctgtcccctattgcctgacctctgtgtgcccagcactcagcccactgcctgacacccaggagatgcacgggaaatggttctgcaaagaaggaataatgcagcaattactatatattgagtgcttacacttactgttttttcacatgcactgttacattgacttctcataacaactctctgaagtcccttcatagcctcaccttacagatgaggaaactgaagctaagagaggttgaggaacttacctaaggacacagtggctaatatatgatgagtcaggacctctaagtccaggctcttaaccaccgtgtcaaacagtcttgtatgaatgggtaggtgtgttggtctctgggtggccaaagataattttattctttacccagggcctcccggggctgggacctacggacaactcaccttttgacacctgccaaaataggaaacaagagtccaagtgatcccctctcctttaagcaccagagaacatgtgaaggggacctttccaatcatacctctggcctggcagagacaatggggctccaaactgtagagtcgggagtgctgggttttagtcctacctctgcagctaactcatttattctcctcagcagtcacattctgcaagcctcaaatgcaaaatgtgtaataacttctgtagaaagtacatgggggcatgaagatcattggcttgattgcttttaaaaaatcggtattgagcactactggggaaatccctggaaacaaacacaattcttccctgagagcttgtgaaaatgcaagactagggcctatgattttccaaagcattttcttccaccaagtgtcaggttgtaggtccttggtcttttctctcttgccttggtacctgcagggtgctgaccagtgctatcatatcccctccccgtttcctaggaccctcttctcggtagactccaacagggcctgccttccttgggcagcatggcaggcctcttggctagtctagtacccacttcttttttttttttttttttttttggatggagcctcactctgtctcccaggctggagtgcactggcgcaatcttagctcactgcaacctctgcctcctgggttcaagcaattctcctggcccagcctcccaagtagctgggattacaggcatgcatcaccatgtccagctatttttttgtatttttagtagaaacagggtttcagcatgttggccaggctggtctcaaactcccgacctcaggtgatctgcctacttcagcctcccaaaatgctggaattacaggcatgacccaccacgcctagtcaggtacccacttcttaactgaaacttagctattccaggttctatcccttttaaaccaactctttgaagagaggtctaataatgacccaatgacttatagctgcagtgagatttttattttaacaggtcacaaaattctcaatccacaaaagtagatttctgaccctaggttattttgttgggggcggagagaggaagtcaaaggttttgcagcctttagagctgcaaaaccagaatttgttgttttgttaaaaatgcacaaataccgacgagtatatttaagtaacacccatagtctaacgaacaaacatgatcagttggcttttccagccctcattctccagcctgtgtgttttctgctcattgtaacacagcgtgtgtgtggcattccatgtttctccagagctttcatgagaatcagtggtcttggatgcatagtgttcccatgagtaccttaattacctaaccattccctgtggttggaaatttatatgggtttttgcattctccttctgctctgaccccaaaataaatgtctgtgttcatacagctattaccttatgtgaaattattttctttgggataaattctcatgatgtgttgttgctttaaaatagtggactccagtctccagagctgcgtctctgcagaggacagtgggacagaagaatcccagggcatgttaaaaaggaccgggtcttcctaaacccacatgcctatatttctgacccagtaccagccaggggggcaagtttccatcccccacaagtcacaaacctgtaactgacactaggatgcttaaggtcaaaggcctggacgaggcctagacagtgggtctggggtagtgtttttgacatcactcaggttcatgttcacatgttgtccccttaccagcatgtgaccttgggccagccactaaccctactgaaactcctttttttcatgtatgaaatggggctaataatggtaccctcctcattagggtattgtgaggatagagttttgcacctgataaatattgtctcctgccccttcctcccctggaaattcaggtctctccctgcagcctaattttaaggcccatttttctgcttccagcccacccctgcccttctaccttcgacctcctccctctgcctctccctctggtgcactggcaaatgggacagagagcctcggtagggccttcctcttagagtcttgcacgcatccctcagtggtctccctgtggctgcttcctgctgccaccaacagatacagacccctgtcgcacagatcatggtagagacagtggtgagcaggaccagacagctccagggagcagtgagggctggcttagagaacctctgttaaactgagaggccaccatcaggaagctctgatccaagatccaggaatccctgactctagggaaaggcctccaatgagagcctgggccctctctgcctgattctgattgtggatgtgccctcaaactccttctcatcactttgttccatccctctttaccctgcagcagctcccacaccctgccaaacaggatgcacagtccagggcagtgtctgagaaagagcagagatctgtcttcatggaaatattgatgtggctctgctggggagcaatggatttatcaagatcaaagttttcctgggagttattgatgcttaatttggaaatagacacactgttgatccctggtatctttagcaacaaagttaaaatgtttgtttttcttcactggttgccatctgagatcttgccggaagtacacaagagaaccttaaatttaacaggaggccctgggagcccatgaggctggcgggcttgggtctgaaatcttttcagtctcttgtaagtgatgagctctcattctctcctgagagctctacggtgccatgttttccactggccttttctgctcagtaattgctacattacaggctgttggtaagttcggaacaagggagctgctgattccatttctgtagcagagaacatgcaccgtgagacttgttgtaccagttcaggttttaggtgctctatttattcttgccccattcagaatgctctcccctgggtctgtggccacaatgctaagagtcatatttatgggcctgcagttgtaattgggccccattctgttcccccaagtggaaagatgaacagggtgtaagcaaccttccctgtagttagaaaaacgtttagttggatttatcagtctgatttttcactcataaacaattgcacaagcctttgcaagcccagagggtcttgtaataatgatggccgtggtccattatggcacagtgatgtgttctacggtggtcattttgctggcaatgacagtcacctctgaacttctctttccaacagacacaatttctcggggtttactttgtctcatcccaagagttccttgccaatgcctacgtcttagctgtgcttctgttccttgccctcctactgcaaaggacatttctgcaagcatcctactatgtggccattgaaactggaattaacttgagaggagcaatacaggtacttggatgattattttttcactttgccataagaaccattattaggaataatgtccatgagtgttattcatcctcatggacactcaagaataattctgctgtaaatttattttttgttgcccattaacgatgttttaaaacagtaaccattgacaaggcagtgtgggatagtggaaaatatcttgggctgaacttgggagacagtgtagctctggctctggttctgccttggactgggtctgaaaatccagctgctcagcccttggcttgaaagtggtagacgtcactaattgatcacagcactctttctgaccaagggtaaatgcaaccttggaatcctctctaagtggctgttccagagttctgctaccagacagtcttctttgggtgtgaaaaaaggaatgtgcttgacatacaaggtctagatagcctctaagacagggtcccctctaagatggggtattggtccatggcctgttaggaactgagccacacatcaggaggtaagcagtgggagcaagcattactacctgagctctgcctcctgtcagatcagcggctacattagactctcataggagtgcgaaccctattgtgaactgtgcaggcaagggtctaggttgtgtgttccttatgagaatctaatgcctgatgatctgaagtggaacagtttcatcctgaaaccatccctctcccccaggtccatggaaaaattgtcttccacgaaaccagtccctggtgccaaaaaggttgaggaccactgctctaagttctatttgaacccttaagtcttgctcactaatgagagtgacctatttggtctgttgggtcacttaagtctaggctcttggtcctgccttctgtgatttccttcttagagtttctggaaagatgatcaaagccagggagtgttcagggcccctctgaagaaggtgatgatgagagttgtccaagtcccagggtcttcactaggattttggttcagctatcagactagagagacatcctgattgagagtagtttaaatgggatagaagtttgtttattcttcagatagagtcagggctgacacaggagctactcaatgatcagagacctggcttcttctgtcatgttgctctgccagccttcttttgtgacttttgtctccatagccatggtgggtattgaaactgccactatatttacatttaaactagccagaagaagggacaagaggagggaacgcattttccttttaaaatggtaatacctgatttgcacataccctctcgcatcccattggtgagaaagtggccaaatggccgtatctagagagtctagaaagagcttggtctttattcttgacagctatatatgcactgctagaaattctctgtgcaaagaggagaatgggcattgggaataactagatgcagctatgcctagtgatgtccatgaagttgtggtaaaatcctgaagctaccttgttctttggaaatgttcctcagaatcattaacattagtcatgtgggagacaggagaagaagctctgcagaaaagggaccgagaggacaaggatatagcttgggctggggacaatgtcagagtccaaactctggctatcttggaatagtctgtgtgaacggtgccctcccaagttgtgcagtgcacaacctgtgcagctatatatggcaaccctgcccatccccagtggtttctcactgggaaagcagagtatttcctcagggatgtcattatgtgacaatagtggaaaaagcccaggaaaatctaagaccttctaagactcatgggggcccagagctgggaggaaccaagctgttgctcagttcagaaaacttctctagaaatcccagcctctcctcacacccctccagtgacaggcagacttgcaccaccacaagcaacagccacttttgtggttgggcagttttgtaattaaatatactaatgtgtgtatgtcataaattacattttccaattatgccaaaagagccaaaaatggttttttaatggttagcatataatcgtttttatcaaattgcttgaatctttcatgttaataagagagattcattactatgccacaaaaagcaaatactggcattaattatagaaacaaattaggggggtggagcgcaatggctcatgactgtaatcccagcgctttgggaggctgaggcgggtggatcacaaggtcagaagtttgagaccagcctgaccaacatagtgaaaccccatctctactaaaaatacaaaaattagccaggcatgttggcgtgcacctgtagtcccagctactcaggaggctgaggcaggagaatcgcttgaacccagcaggtggaggttgcagtgagctgagatcgtgccactatactccagcttgggcgacagagtgagacttcatctcaaaaaaaaaaaaaaaaaaaaagtggctcatgcctgtaatcccagcactttgggaggccaaggcgggtggatcacaaggtcaggagatcgagaccatcctggctaacatggtgaaaccccgtctctactaaaaatacaaaaaaaaattagccaggcatggtggcgggtgcctgtagtcccagctactcgggaggctgaggcaggagaatggcgtgaacccaggaggaggagcttgcagtgagccgagatggcaccaccgcactccagcctgggcgacacagcaagactctgaaaaaaaaaaaaaggaaagaaagaaggaaaggaaaggaaagaaaggaaaggaaaggaaggaaagaaagaaagaaaggaaagagagagagagaaagaaagaaagaaagaaagaaagaaagaaagaaagaaagaaagaaagaaagaaagaaagaaagagaaagaaagaaagaaaaagaaaagaaaggagttagggagaaaaaaaccctttctttctttcttttggagatttccggaaaatgtacccttacggatgagagcctgtgtcttcatgggttagagaataaccacgctttgtgcataaaaagttattaagcacaattcctgaattatacataattactagctgtcagtcagttgtgcatttctgtgtatgctggtcttcacttaataagactttatttcacagatcacttggtgtccctacttcactgaaactaggtgattatcttttgaagtctcatttcacataacctaggaggtatatagatttctttaaaaatgtcattgccattattttaaaccttacccatggtatatataaacttacagaaagacagaataggttcattattttaaaccttgcccatggtgtatattagctcacagaaagacatagaataggttcctgccttaagaaaacctgacccacaaaaaagcctgggtttacacaaaagaggaattaagggcggggagcccaccttacaacagaatgaataatagaattttatccaagagcaggcatcctgaggacatttaagacccggatgcatttttccttgttcaagagcacacatccaaaaattgcagtctttctgcgagtcatgatcactctgcacataaagcgtttaggttcagagctcggggaggccattaccatggctgctctctgtctgccctgtgagggtccttggggtggctgcactctggggatggtgctggggctgactgactcacgcggtcgtgtaacacatcagaccttccaaagtcgaacccttgttttgtttcaaggctcaattatgacaggacttggtctcagagcagatcccctccctaggctggagaaggccactttaaaacagatggcctgccccacttcatcatttttatggctctgatctgtgttctccactggcctctggtaaatcaagaatacaagtggacatgaagatctgctttaaaaaataaagaacagaccgggtgcggtggctcatgcctgtaatctcagcatttggaggccgaggtggatggatctcctgaggtcaggagtttgagaccagcctggccaacatggcaaaaccccatctctgctaaaaatataaaaattagctgggcatggtaggcacgtgcctataattccagctactccggaggctgaggcatgagaattgcttgaacccggaaggtggaggctgcagtgagctgagatcatgccacttcactccagcctgggaagcagagcgagactctgtctctaaataaataagtaaatgaattaaattaaataaaaataaagaaccaattaagtcctgtctacaggaaaaggccttacttgctggagaagtagcttgctgtgctggagtagactagtaagttggaacggtgatacagtaccaccttacagagctgctctagggcaccatggggactgtctgagaagcccctggcacactgtaacaggtggcatctggtgtggtgatgatgatgagaatgatgatgaatgtgaaacactctgctctcatttctagaccaagatttacaataaaattatgcacctgtccacctccaacctgtccatgggagaaatgactgctggacagatctgtaatctggttgccatcgacaccaatcagctcatgtggtttttcttcttgtgcccaaacctctgggctatgccagtacaggtactagatgggctgaggggaagggaggggggcagcaggacacacaaccagaatctgctggtccatggccagtaactaggagcacaccgtcttccactccatgcttgcctgtacctttcacacacttggctataccacaggctgtacctctgggtccctcctgtcccatactctgcaagcactgaccatctctcttaatgaccagagaaggcagtatcattaagactttaaaaatggagccaactttataaactatagaaaaatcaagccaggttcaggggctcacacctgtaatcccagcactttgggaggctgaggcaggaagattacatgagcacaggagttcaagactggcctgggcaacacagtgagaccccttctatgcagaaaaaaaaaagaagaaagaaaagaaaaatcgtacatggaatgcccacagatcttaaaagctatgttgtagcaaaatatttaattacatcaaaaagtgttagtgatgtatttttaagcaaaaagagtaagttacaaatagtatatgttgtatgcttactactaaactggaatatatgttatgtatacatttgtacagattcacacatgaaaaagaattggaaaatcacatagtgggattataagtgatttttattttctttatgtgtttctaaattctctaataagcgtgtataagatttggaaatcaacaacatgatacttttagcctaggcaacaaagtgagaccctgtctgtacaaaaaattagctggaagtggtggctcacaactatagccccagctactcagaggctgaggtgggaagattacctaaagtccaggaggcagaggttgcagtgagctacaatcacaccactgcactccagcctgggcgatagagtgacaccttgtctcaaaaacaaacaaaacctggtgttttttagccagatgtggtggtgcgcccctttagtcccagctacctgggagtctgagatggaaggattgcttgaccccaggagttcaaggctgcagtgagcaatgatcacgcccctgcacttcagcctggacaacagagagactcctgtctcttaaaaaataaaaataaaaacgttaaaacatggtatttttttaaagcaagacaacctttggtgctggctcaggaagaggtacattaccccccaataatcagaggagaatcgtcagcatgattgatctgacctcgggcttcatgtgtcccatctcccacccggagctcttccaccacagagtctgatcctgtcctatgcctgggactaaatcttcaccctggtgttcaggccagaaaccgaaatcccagacccattcccagagggcgggaaggttccaccgggagagcttgatgtagcagaaagtgacttgggtgagacaggctgattcaaatacttaacctctctgagccttggtttctttatctatgaaatggggaggctgcccaccctctggagttgctatggcaattcagttagataatgtaagtaacacagcaggcagagtggcccccagagtcttcacttcgtaaatatcagatccctctaccttgcacatgtttggtatgagtgaggtgttaccaatccagaatccattgcttcttgggataaagattccataaaccttcatctccagtgatttgtattggtcctccttacttgtaaagcttagagtttaaaaatattaaaagaaaaaaaggggagaggctcccacagggacacagctagacaagatgagatgcagggaatctgatgttcttttttatgggaacagtcatatatgccatcccccattaccacctacccatgcccagactgcccccgctccattctgccaagacagatcaatgactataaaagctacaaaagggcctggagatctcatctagtttagttaccaaccaaccttttatgcacaagactttctaagctgggtgtggtggctcatgcctgtagtctcagccactcaaaaggctgaggtaggaggatggcttgagcccaagagttcgagtccagcctgggcaacatagagagacctcatctctaacacaattttttttttgaaacatgaaaaatgaagatttctgaccatgcttctctcattagttaacactttgggctgtgagggtctgatgcagagagacacagcctgggaggatcctaacatgtacacagcattcaaaaggctacaagacactttctgttgtgtccccttgaacaagcagtttgtaagattttgttggccaggcatggtggctcgctcctgtaatcccagcactttgggaggctgaggctgatggttcacctgaggtcaggagttcgagaccagcctgaccaatatggtgaaaccccgtctctactaaaaatacaaaaattagccgggcatgatggcgtgtgcctgtagtctcagctactccggaggctgagacaggagaattgcttgagcccaggaggcggagactgtggtgagctgagatcgtgtcactgcgttccagcctgggtaacagagcgagactcggtctaaaaaaaaaaaaaaaaaagaaatcaggttttgtctactaaacctgctgcacggttaccgttactagtactcacagggtttgttgcacatgcatcgttgctaatagtgctaactaatattaacagcccttgccctatgcctggccctgtcccagcccccctcccttgtataatttaacccttgcactgggggtagagattttcatatctactgatttcttacctttgctcatttatcatggagtgtcctttggttttctgtgtttgtatatacctttaccacttatagatttgaccagcactcaagaaccagtgttactcctgggagttaatacaatcccagccccatggcaaagaaactcatgtggttaggattctgtgtgcagcctggttagccacagggcacgtaaggctttttataatattgacatgagtgcagaagccccattcccgtgtaagccctgagggctcttgtttcataatctttttttggtcacatgcacacagctttattgagatataacccactcatttaaagcatacaaatcagtgggttttagtgtcctatattcacagagctgtgcagccatcatcacaaatgtggaagttttcatttccccaaaaagaaacccgtacccattggcagtcactcctcatcttcgcccccagcccttggccaccgtttatctacacatacttttgaaaggctagtgaaactttctcagaaaaataaatgcttgctcaaacatttgggctataatttcaggggcttcatgggtgcccccctgacatttatcaagaacaccaggttaaggaatttagctataatggaggcctctgtgtttcccagtctcctgggtatcagaggcccagagagggcaggtgccttaccctgggccacgcagtgaaccagtggcagcaccatactcacacatctcctttctgcggttccccagtgacagagttctcaggaagctttttcatttattttctgagaggagggtaggccatcttgtattgatctccaactatatgccagccacaattctaggtgcttatcataaaggttcatttaatcttcacaatagtcctgcagagtggacagagtccttcagagtgggcattataatcaccattttaaagatggagaagctgaaaaccagagaggttaagtaactcacccaagactgcacagcaaaaggctggggctttgaaactcagggccacagactccaaagactatgtcctccccactatgctagatttttttcctaacctgtgaataggagacaaaatagtccttttatttctcacagttgctttgcacactcagaatccatgatttcttctgcatgagggccattcagacctgtgcagaagagagtaatggaccaaggagtcttgggagcacctaggaggaggggatgggggagcatgaggaggagccagggaacagcagcagctgcagcaccagctcccaccccagcctctgccagtctcttggaggtggtgtgggtgcagacaccggctcacaaggtgccctgttagtgagcttggggtgccatgggagccttcttgttgtcaggcccaacccaagctggctgaagaacaccctgatggcctccatttgagcacaactaatgaaggactggatgccagagataagtccaggagggtgatgctgcagggcaggccagggaagagggtacttcatctctatcatggtcctctgcccatccatgccagcatctaacacctgttaaacactgggaggcaggtggtgaaggggccacttcccagcctctaagatacctcctaagccaggaggcattctgtgattaaattacagggcctcccacttactcctttatccttgaggcggtgctggaagcttaatgccaatctggtgtagggctctgggactacaggaccaaggcaagcagtcctttctctctctctctctctttttagctaaggaagccagcacatctgttctttgagaaaaagccctgtatttagaggtgtctgcctttgaaggcaacctgagaaactgtcatcttggcgctttggggactggccatttacacttctcataaatattcagaagtaggcagtcatttacataaagctaaatgcagaaggaattctcttttcagggaatacctggcagattcattaaaaaaattaaagaaaccaagagcataagaatgaaaagcgaattctcggaccccaggctggttttttctggcatgggtgcagtaactttgcctctttgctcagttatcacttttttccaatgacagtaaccataagccctgagagccagcaaatagaacaaaaggtgctgtcacaaacattgtgcaatctcatctctgagatttccatctggaaaatagactggagagagttaaggcttcaaccagccttgcagataaatgcagttagttaccagcccagcaaccctctgcttgcatgagagcccattatgctaacctccttttgaaattgctttgtttctcctccttccctgcactccactccccaagataatttggaaacctgggcaccaaggcttgtcccactctaggggactggggaaacagggattttgccagcacctcctggcagggcaaccatcaggtcaaagggacctgacccatgaccccttcctcagatcattgtgggtgtgattctcctctactacatactcggagtcagtgccttaattggagcagctgtcatcattctactggctcctgtccagtacttcgtggccaccaagctgtctcaggcccagcggagcacactggtgagtgcccaaaggtgtgtgtgttttgtccctcttcccctccttccctcgacagcagcaggtctcctcccacacacccacactgtcattgactttgactttgactttgagtaggccacttcacctgtccaggcctcagcttctttgtctgggaaatggagtcaatgggggaggaggctgcctcccggtgaggacaggaggcgggcatggcagtgacagtattgacactcaggccttcctctcgggtgggagacggagcagaagcctctcccctctgactcggggacccctgcaggagtattccaatgagcggctgaagcagaccaacgagatgctccgcggcatcaagctgctgaagctgtacgcctgggagaacatcttccgcacgcgggtggagacgacccgcaggaaggagatgaccagcctcagggcctttgccatctatacctccatctccagtgagttcaccccacacagccagccctgggtgctgctgcgtacatgcaaggagagggtgtcagagctcgggtaagagggggtgcagggacagaagcaggaggccttgagattatccgactcagtaggggagcctcaaactggctctgatagctaagctcccagaaatcaaagtactcttcattcatttatccaacaaacatgcatggaaagcctgctatgtgctggacactgtgctggccctcaggatacagtgatgaggaagagagatgaagtttcattcctcatggaactgatatgttattgacagacagcagcaagtaagtaaatgaccacagttttgaactctcctaagaatgaagactttttagtaagtcagactgagctgtcattgccctggggaagctacaagaaagcttccatccacttggggctatgcaaaagaaaaagactagttatccttaaatatcagaagcccaggctgaaggtactcacaggtgtagggactgaatttatattaaccaagtagtttgggaaccccaagccaaggaagaagaaaaagaccaaaactggtaaaagtcctagagtcccatatacttgaaaccattttactgagaatgtaaaacttttttttctttttttgagatggagtctcgctctgtcacccaggctggagtgcagtggcaaaatctcggctcactgcaacctccacatcccaggttcaagtgattctcctgcctcagcctcccatgtagctgggactacaggcacacaccaccacacccgactaatttttgtatttttagtagagacagagtttcaccatattggccaggctagtcttgaactcctgacctcgtgatccacccgcctcagcctcccaaagtgctggaattacatgcatgagccactgtgcccagcccaaaagattttttagaaattgaaattttagttatggaaattaattcagtgaacaatggtcccctggtcagagtgagggcttacggaggtcaggtgatccatggagtcctggcccaagtttatctcacagttggtctcgtggctccgtggacccatcccatggtggttacttcccaagtgcataattgggatgtagatatttagcaaccagctgacttcacactagttccctgacctgtccagtctaagagtcattatggccaagtggaagcccctggaaagaagaaaacaaaaaagaaaccaaaacttactcagtgcacaggttacatgaatgagtatagctgaagagagaatttttgaattagaagacagatgagtggggattacacagaacgtggcaaggagagtaagttggtagaaccattttacagatgggaaattaaggccagaggggagtgtgttcctgagatccctcctgaggttagtagcatggctcggactagatcctccaaagtctcttaactcctggtctcaggctattttccacaaagagctgggggcctctgtggggtgaagaagacttaggacaccatggggcaccattatgaggccatttcctcctaggagaaaaaaaatctctgggctctgaaaggagtagaattagggtaggaaattaagagaggctaccgaccacctcctccaactaaaattggttcttttggtgccaggaagagacacacctggtgggggagggaaggtggtaatggagggggtgctggtagtgtctcccagatagacccatccaacaagtctcatggagaatgagacggtcactcaggtcatctgcgtattcttggcattcttgctgcctagagagagagtctgatggagctaggtggccaccaagctgtcccactccccaagacagtttggaaacatgggcaccaaggcatgtccctgtctaggggactggggaaatatcccatagcagtgttctcacagtatggggctggccatgaataccccaggagtccaacctccctttgtccagctagaccatggtgtcctatgcctcaggcagggaatgtggtccagtcatcagtggctgggccgtctgccatacatggtgcaagccatggcgttttatgcagaaagtcctgctagcatttgattttctcagaatggagctgtgagcatggcaggcaaccactgtttcctggattcttcaccaagacaccccaagttcctggtctctccccgttatcctcatccctgaccctgtggttctcagagcctccaaacacactcaggctaagcactccatagacaggggaaatttggaaggaacatctagggagctcagaaaagccaatgtccctagccccaggcccacttcaaccttctctctgtcagtcctgcctgcccctggaggctggttacatgaagagtaaccccctgcttgtgtatagccccccagttttgtacaggtttagagacagttcccagcagtaggaacagctgccgaggtgggagagggcttctcccgatagccgggggacttcctctcccaggaacaacagggtggggtagagcaggcttgtcgttgctgagatagagagagggaagggaaacaacaaggaaagtgggggcactgggtccccaaggttcctggcacagcaagcagtgaagttggggcagcctcaggtcatgtagtgggggcaggtgacatctgctttgactgctcctaagagatatgtactcatctcctggattccaaactgcagcctgggacatgttttcttatataaacagcatcaaaagatgtgtgagttcccaggctagcccactgaaccctacctagtgggtgctcattgtcccccagagcccccagaagacaagccgtggctttgtgatgggcctggggccaggaggacctagggatatgttgtgaagagctgagaagactctggaaaaaaggggctctggagccaagcaggagcccgcccaggactcctcacgtgtccaagtcacctagggagagaaacagagcagcccaggttggtccctggaagagagcagcggaggaggggaaaggggagagcccctggggagagctttgaaagtcaagtgctgtttgctcagtgtgtttgcctttccgaggatgtgtttttttttccctccgttagtcagcagtgggagggggagagagacgggtggtagggtgcagggtacctcctggctgcaggcatatgctttgagtgcgtgttcatttacctcctctggacttcctgccttctgttaccagggatcaagacacaggtcattaggcgtgaggtaatggggcatctcttgttctgacccctggcgccagtcttggagtcctgacgctgcagaggagccccagagtcacatttcctgttggggcccatcctgctcatatgcggcaccatcagacttctgggcaggcaagattacctgtgactctgtctgatggtctcgccatcaatatcactgagagtagctgtgtatggagtcccgaactggtacaggataaaacagggggctgaaaagggaatgaatgggcacagtttctctggcatcaaaagtcacatccagaattgatatttcctgttgagtaaaaatagaaatataagttgctcagtggatgttgagtgagccctattcatgtgccccactctgtgccaagcaccaggaaggagggaagggaaaaatgataagatgttctccccgttctccaggagtttatgctccactaagaagtcagagctaacatgcacagaacagtgtggcagcgagagcagaaccgtgtggccagctccatgcttgccgcctagcaagcgtgattgcacttcatcctcataacaacttggtgaggtgtgttgctctgttgtcccattttacagcagagaggactgactctcagtgaattgaaatgtctcagtgaggtcttccacagcaaaaggcgaagcacagagaaggaagtccatgtgggctgggagttcacccagagattcatgtaggggcaatgtgggctgtaccttgcaagatggtgggatttcaatgaggagaagacaaagtgggaggaagctggagacaaggactgtggtctcttcctttagaagtcagttcaatctttttttccttgtggaagcagcataactctaggtggttcctctgtatctgaggacaagctttgtagaggtgacaaaggggtcctaggtcctatcaggcaagcactcgatatgctgccagttcattctgtccattgtgagatacccattccagagcgcttcctctgtgccaggctctacggaggttctggatgttaaagaggaagcaggcatggccctggccctcccagtcttgtgggagattgatcatgcccatgaatagtgaccatgtggtcagagccacagggtcaattccaaatgcccctgtttctcttttgtgttactcacctgactctgggtctttcgtttcttccattcattttttttaaacaaatatttcctgcccaccttctgtgtgccaggcctggggatgcagtgggagaagcctctgtcctcctcagtggaggcgctaactcagaacaggcagtggagaaaaacaacatgacctggagacctggtgccccttccttccccagcatctttgaaattcttttggttgttgttgttttgagatggagtctcactctgttgtcaggctggagtgcagtggcgcgatctcaactcactgcaacctctgcctcccaggttcaagtaattctccctgcctcagcctcccaagtagctgggattacaggtgctctctaccatgcccagtaatattttttgtatttttagtagagacagggtttcgccatgttggccagcctggtctcaaactcctgacctcaggtgatccacctgccttggcctcccaaaatgctgggattacaagcatgagccactgtgcctggcctgaaattcttcaatatctacctgcccttctgccagttggtgcagccacagtgggctgcttatgcatatcctggcctggcttggtggggagcatggctgagggagagccggggcacccatcaattaaggaggtaaagatcagtctgactgagatgcctcctgccacacttcctcagctgccagcaactgacaccattaacctgatttccttccccctctgttgactgcactgactattggactgaatgggaaacagccccgtgcacctcaaaatgcacttcccctcctgcagatgcatcttgcaattaggcccaaactgtgagcctgcatgctcctcccctggccctgcacaggcaacaaagctgaagttaatcagaggtacaaatggctggctatgcctctctgacacgtaacttctggaacatgtatcaatgctttggaaatgaaaagctcctggtattgcaatgccaggctggtgcccataagggccagaaaacattccttgggcaaagccagggggagtgggtgatctgatcccagctcaggtttgttgatttgttgttttgtttgtttcgttttgtatggggcaagggttgagggtatgaaaaacttacactatcatttactaccgtagtccccagaacccagcacaccagcacaaggcctggaacagggataccttttttgaatgaataagtctttttttttttttttttttttttttttgagacagagtttcactcttgttgcccaggctggagtgcagtggcgcgatctcggctcactgcaacctccgcctcctgggttcaagcgattctcctgcctcagcctctcgagtagctaggattacaggtatgcgccaccacgcctggctaatattttggtatttttagtagagatggggtttcaccatgttggccaggctggtctcaaactcctgacctcaggtgatccacccaccttggcctcccagagtgctgggattacaggcgtgagccactgtgcccagccttgaatggataagtcttaagggatatttttggaaaggatattctaaaaaatacccatgtctctacactattgcagaagggctttcagttttgatggcagcctttcaggccagcctacacgcaactaaacttttccataacagcatcacacttacacaagaagaaggttttataatccacttgccattatttaacatagttcttcctccttaactttcaagatctgagcactataatgttcttctttttgtttttgtttttttctaaatcaaattaaggtgagtcacctcaccttgggcctgagttggacagaaatctattcttggctatattccccacccctccaccaccttggaaccttatagaactttatgtggttcaggaaaatgagggcgaggcctcagatcttcaacccatgacagctgtatgcccagctccctgccttcctgtcttacccccagctagggcacaggactgactattgtgcccagagaggtgccagagcctgtaacaaccccagacttcccaggtccagccacatccaccccagagccccaaaagatgatcttcagagagacctttaaaacacaagtagctggtcacttccatccagaccagaacccaagatggctgtgctcttgctgagacatgttggttgtcattgcctccgagcccactttagccctcagctctgtaccagaaatgctgttcctttgggaatcacagccaaagaagagatggagcagttctggaataagaacacaagttcaaactgtcccatatctccccacatcactatctacagttggtctcttcccatggcgatgtccatctgccaccgtggcactggtattgctttgagtgcaggggtctctctttttggcatgttggccctgttactccctgggaactttgagtcttatttggaatgcgtgaagtccctgtgtccggggccagcactgatccacacagctaagtttgcactcatcttccctctcatgtatcatatctggaatggggtctgacacttgatgtgggacctaggaaaaggcctgaagattccccagctataccaatctggagtggttgtcccggttcttactgtactgtcctctgtagggctggcagccatgtgaagaacagaggttcccagcatcatcttcctacacattattacattcacccatctttctgtttctcacttttatctccagcctgggaaaagttctccttatttgtttaaatccttttgtgcttttagatccccttggagcagtagagtaccttgtagaccataagagtggaaaagggtctagttttctccttgtttctaaagatggggtggctgaaaaaactccccttttttgcctacagcttgcctctctgggcctagaagtggttattctgtctccatattggcctttgatttgtgctgagggtcagcttttggctccttcttcctgagacagtggaaacaatgccagctgtgtggcttctgccctgggggctgggggtgaggctttgggtgccactgcctgtgggttgctggcttaaaggacaattctgttcattggtgagagcccaggccattaacacctacgcagtgttattgaaagaagagaggcgggggtggaggggaattagtctatcccagctagagggagataaagagggctagttagttcttggagcagctgctttgaggagaaaatgtatagcttttgacacaacaggaagatccagaaaattatcattgaacatattaaaggttatttctttttcttgcaaaacacacacacacacacacacacacacacacacacgcgaacacacgcagctgatgattctactctcccagccccagccctgaaggggacccagaactccctgcacaaaggctgtccttcaaggggagggtgaaagaagtggaaaatcacattttcattctttagcgtctccatacaacagccagaactgggcagaagctaattatatcagaagcatactccatgttgctgcatcagctttgggatgttcatttttaaatttatttatagcttgtctcattcctcaaaggagttcagggagctacaaaaataaagacaataaaattgaaaaaaattaaattaaaaaaaccatgaccagggaaaatgtgcagtagaatgaagtgtcaattatcacgttttctgactgcaaaatctcccccacggctgatgcaccatcatttactacaacagcccctcttgttggacatttccagtttatttcgtttgggatggtttgttgctgttgctgtggttgtggttttgttttattgaattttgtgttagctgcagctaataccatcttgctgatggctttgcgctgctcttgaatgattactcaggataaatttcctggagacggattataggatcagaaggtctgaacttctgtgtggctctagctacaaagcaccagattgctttccaagagcgttgtagcaatttataatccaacactcagcctattttttggctgggagtcaagccccagaatgtgaaggaggggtcttggcctggagcaggggctgagggatgggtgcacaggacccctccttattggttatttatggggatgggccaggaggagcagaatagaggcccctgccctcccagttgctccttggagtgactgaccccataggggaggggcgaggctacctcacatttagaactatgtagttggtgatggtcaaggtcctaggtctgatgggcatcctcctccctctcctcctcagccagtaatggctgcactatgtcgtatgtcctagatctgggtcccttttgctgtgggaacaccaataatacttacgctgtttcctgccggaaacggtgcaggagggctgtggcatggtagtgggccctggaaaccatctagccttcatgaggaagggcagttaaagcacaggcatgtatgatgttggtattgattaaaagcctcacgggcagagaaattcgccatctgccagggccccagccatacgagggctccagccatacatcctccaggagactgggacctctccaattgcaggagccttgccttccccatcagattaggaattccccgaggatggggacaatgtccttcccacctgcttgagaactcctaaggggcatgtactctgtctccccattgtatctggaacttcctgggagcatagctcctgtctccgtcctcagactgggaatcccctaagggcagaggccatgtccttccacccacttgggattccctgaagttggggaccacatctctgatgtacaatgctttgtatgtactgactgctgcaggattcttggagtaaatgggcagtcaacttcttggactggtattgaccatctggacttcatcagagtgtccaagactttgccattcattagacaggggccatgtgcacaggcagagccctggcctctggcttctggctcctgactcctggtccctctgctttaatttggctaatggcagaaccagactcctttctgggctgccctggaaggggatccttgaatgaaagaggatagatgggaaggtggcagctgacatggttacctcttatgccatgggggggctgctctctctggaaatttaggcctggggtcagggcactgttgagcattttacaccctaggccagaggaggggtgacctgtggagcagggctaagctagtagcccatgaggtatgatgtgtaggcagcacctggggctcacagagcctgttacccatgttatctcctctgaccttggaaagagctggggtgtatgaacaagtatttataagtttacaaaaatcatatgaggaaactgaggcacggggaaggtaaatgacatgccctaggttacacagcttataagtagcagggattctgcccttctgtcacaccaagtcccactgtcttttcttcctggagtccctgtgactgatctaaaggccacatgtttaacagaataaggaggaggcctctgttgcagcaaaccagctaccccacccgcacacagactctaagggacatcctgctttaagctgtccttagttactaatacctcagtgagaatgagtttgaaattttctcaagagccatgggagactaggaagtctctaagcttcatagagagcctggcttggggggacacaggagccaaaggcagaggaagaagtggcagctttgtgcccccagaaacacgtgctcctgacctcacagttggccacagccagccaactctcccatccttctcccaccactttcccgtggggctaacttcaccctgtccacacggagtgacttaacagtttaagccccagagtcgggggccggggtacctgggacaagagtcctgagggaaatggggtgaggaactggaagtgccacagggctagagttctgcccctagcctactggagctgtgccccacaggctggccccactggactgcgctgcctccaagccatcctgggcatctccatgtgtagctgtcacgctcctcccactaaacgcctccctgtgcttcctctgcagttttcatgaacacggccatccccattgcagctgtcctcatagtaagtggatcctttctccatctcttgggggtagggtggagggggagggcgtctgcagtgacaggctgcccagatttggcctttctgcacaggggcctcagaagacaggctccacagccagactgaaaataggatcgaaagtttatagagggtgtggcccctccccaactccagccgaacaggggcctctgcctccaggcctggaagaccggaggcttagtatttagagaaattaaactttcttttaaaaaatagctatccaaatttttaatttttaaagtgaaacatgtgtattgtagaagtgatgggaaatccagaacagaaagctcaaagagaattaaaatcacccataatcccactggtaacatttttaatgtgtttctttccagtctttttttaaggcctatgatatgtcattttctacaaaaataggaatgtgctatgcatgcagttttgcaacctgctcttttaaatttaggaatatgccacacacaattctccatgccactgaatattatgatggtggctttctaaagcaattttgataaaagctgtgtgtgagctgagccatgggggtcaagcagcatgctcctacagaaaggcctgggcccctacgagcctgcagccccctcacccagcctcccatccccatcttctgtgatggctgcagttccttaaaaagatctgcttatttcccccggggccagtgtccctgagctgtgtagagttcacagcctgtcggatacacttgggaattcacttccaatgtgatgtattgagctggttcctggcctggctcctgggggaactgtgggtaacagaggccactgagccagccaggtggctggggcaaagcactgtgcagtttcgtaatcactctgtttacgttatcccgatgaggactggggagatgagcaccccgcctgctgtctgcagagggggccgtgctgacctaacccgagatctcctccctgcttattcccagccaagactgggcaggacagggagtcttggccaggacagggagggagcagcccctgctctccagcttgaagtcctgaacttgttggggacgtttccatgagatgactgtggggatgatgaaggtgtctccaactaaaagatcctcttaggagcctgctccctgacagccctctcatttcccttccagtgctgagcgtttccagtgtgggagggacccacaccctgggccaccctggcctcacttgtgcctctgtccacagactttcgtgggccacgtcagcttcttcaaagaggccgacttctcgccctccgtggcctttgcctccctctccctcttccatatcttggtcacaccgctgttcctgctgtccagtgtggtccgatctaccgtcaaagctctagtgaggtgaggggagggtccgggcgagggcactgggcaggcaggtcctgtgtcagcctcaaggcttgctcgagtgatggccaaaccacagctgtttggtcccggaacacacccccattgctgggccttgctgtagctggtcctggttggtcagagggacattggcctgtatggtttcccagctcgccatccctgagcaaggacttgcttacatacctcccaggagaggggactcactgtcactttcacgacaacttaaaaaaaaaaaaaaaccagtgttgagccaaatgtggaatcctcctaaattctacccactggtcctaacttcaccctccagagccaccaagaatgaggccatcccgtccccacgtggctgccccatggatatcagaaggcatccactgtgtctatctttcccaggccaagtatcccctaccctttccacagcccctgagccctcacagcctcagccagtgaaacagcttcccccaagcgctgggtcctgctctgattggcccacagctcttggaggctcccacttccaggctctagagcctcatggggactctgccactgtcccagaggcattgccctcttgggaatgaaagcctgaaggtagaaggctgaggctttggctgggaaatgccctgtctggagtgagaagatgtccttgggcctctgaagtagctctgcctccttgaaagcaagagcctgtcatgcctctatggagggctggcttgtccttacccatggccagagaaccagtcagtaacaaatgtcctctgtgtcttcagccttgaggaaggtgacacccctgtctcatgggaccctggcaggtactgggaagctggaaggaaggagtagctgttggaatgaagtagctgatagagagggtagcttgcagggggagactctagcatgggttcaaagatggaatggggcataactcagcaaaattatgctctaaggagtatctgaccaggcagtagctggttaaacagggattagctcccatttccacagtcggctgtgctgactcagtttcttgaccagggtgttgtggggtctgaagatcacccctcctcccaccacccactctccagccctatgattctgtgtagaaaccacagatttaagaacgctgcacctgcctgaaaactgttgcactgatcccaaagcgttcatattttcaaacactctggatcccactgtttccaggaatggaacaccagagtagcagaggccttttcagtgaggcagctcaggctctggctgaaggtgggcgcaggacactacctgaagcttcaccccaagagatgagggccagctccactcttcccagtcaccgcctgtgggggagggaggctggacagggcatgaaggcagagcctggtggtctgcccctcccatctaggggtggcgcacagaaagggagactccaggccacagctcacttacaccccagaataaccttgccttgagggtgggatggcttgtctgccccaggcctgttggacatttagcaaaagagaagaaaggggaatacaaacaatcctgagcttcccagaaagctttcacacctccaggatgggagagaatgaactagaagagtgaagcttccagtgcttcctcaggtccacagggaaatctggacaggggagagggtaggaatagccgcctcccccgtgagtaatgacacctcctccagcaggctgttatggggatccgattacataatgctacaaaacagttaacacagtgtctggcatttagtgtatgctcacaaaatactagctattgattctttaccaatcctagtcctaactaaccttaaccctgaccaatccaacaccaaccatccttcagtctaataacccagactaactaacttcaacattaaccctaaaactaaccaatctcacctccaatccagaccccagcctattccagctgactggtcaaccctagcaaaccctggtaacaccaattacctgcccccatgcccactggtctgcccccttcagtgtgggctttgtgggactatacttcaggcctgagatcctgctcagagctctctatcaggctgcgccctctcccctcccctctgcccctggcaggggtgaggggtgtctctgtgcttcccgagcagcgtgcaaaagctaagcgagttcctgtccagtgcagagatccgtgaggagcagtgtgccccccatgagcccacacctcagggcccagccagcaagtaccaggcggtggtgagtgcccggcctccccttgctactcccagcatggtcctctaaggcccaaaacttgggcctgctgtgtcggacttctgccttttttcccaggaagaggggctcccttccctacacagctcccagcccagtgggtcctcacctccaaaccacccccagcccctcagggttgtgaaccgcaagcgtccagcccgggaggattgtcggggcctcaccggcccactgcagagcctggtccccagtgcagatggcgatgctgacaactgctgtgtccaggtgagtcctgctgccccatgcctggccacccagcaccaactcccagagggagctcagcacctggaaagccagaaagctgcatgcttagtcctctgcagaggtcaccctgcctgcctgtacggtccataggagtccagaaaccagggaccaccaagtggggggacccccagccttaggcaagggtcagcatgagaaggccagtctcccactcccctgctctggaagtgatccaggggctggaatcagtgtcttttggctttcatggaggaggggaagccagagactattcactgggaactggctgcctttctgttctctcctgggcggtgggacacgcctaatgaagatcatgggaggctacttcacgtggaccccagatggaatccccacactgtccaacatcaccattcgtatcccccgaggtatggcccagtccacccctccagcatgcccctccccatgtcccactgaataacatagagataaaaagacaaagctgcatttattgagcacctactctctgctcattcttggtgtatgccctgggtatattatagaaggggaaggctacattctagaggcttccgtgtgctgggtgggagtgaagcactaaggacagggtaaaattgccagccttaatgtcaaaccatccattgcagacagtataggtaatgcacaaaaagatcagaagtgggtagccaaggaacgcaagtggaagtgatggggtttctgagaatggacaaaggccctgaggccatgaggcaggaggattttctggcagaggcagccatgagcaaagtatggaggtgggttggaggtgggacccaggatggtgtttcttgggaccacaaggagcctgggctcatactaggagcatgggaaaggagaagcgagtgcttaggaagggtggcggggcaggaaatcagagagggggaaggacctggggagccagaggaggatgttgatttccagaaggaaaggattaaagagggagaggacttgctggggattctaggtaggaagaaagaaaacaggggccccagggttgggtgcatctgtctgtctgtctttctgggtaatggttgttcagactcccccggccccactcacatctgccaccctccctccctgcaggccagctgactatgatcgtggggcaggtgggctgcggcaagtcctcgctccttctagccgcactgggggagatgcagaaggtctcaggggctgtcttctggagcaggtaatacatgtatcctcagggcccagtggaggggaaatctccttttaaccatcctcctcagttgaggatgcacacacatttattggagggcccactctgtgttcagtgaggactcaataaatgctgctaatggatattctcatcatcatcactagtacgtattcacctcttactatgcgcaggttctttgctaagtcctttgcatgcattatttcatttaatttttatgataactaacaaggtccatactgttctcaattctcatttatagaggaaggttaaactatttgtcctaattcacacagctaataagtggcagagctggaattgaaactcagttctgtcagactctgaatcccatggttactcagatgcacggcagtaatttcccagtgtgggaaattgcaacaccaacattggtttccagcttggtcctgagctgcactgacctacacaccataagtgggtgttctgaagatccagatgtaaccaataaatgttggtttctgggcaaagatcactgtcttaattaaagagccagaaccccaggctcagtcaatcacgaatctgttatttatacccacctacttccaagaagcacttgaaactagttgatgaaagattcatgtaaaaatcaaaaccacaatgagataccatctcacacccgttagaatggtgatcgttaaaaagtcaggaaacaacaaatgctggagaggatgtggagaaataggaacgcttttacactgttggtgggagtgtaaattagttcaaccattgtggaagacagtgcggtgattcctcaaggatctagaaccagaaataccatttgacccagcaattccattactgggtatatacccaaaggattataaatcattctactataaagacacatgcagacgtatgtttattgcagcactattcacaatagcaaagacttggaaacaacccaaatgcccatcaatgatagactggataaagaaaatgtggcacatatacaccatggaatactatgcagacataaaaaaggttgagttcgtgtcctttgcagggacatggatgaagctggaaactatcattctcagcaaactcacacaggaacagaaaagcaaataccacatgttctcactcataagtgggagttgaacaatgagaacacatggacacagggaggggaacatcacacactggggcctgtctgggggtggggggcaaggggagggatagcattaggagaaatacttaatgtagatgaagggttgatgggtgcagcaaaccaccatggcatgtgtatacctatgtaacaaacctgcacgttctgcacgtatatcccagaacttgaagtataataaaaaaagatgcatgtaaaataaaaccctttaaaaaggtaagaaaataggaactgagaaatgaagagggtaaaaagatgttcagcaacctgggcagaggacaactacagccatcaacataaaacctggctctgtgccctctggtagccaagggaaaaagggatctctgggctttggagtattcatttaggaataaaagttgcagccaatcagcagaagggcaagctttccctaccaatcatttctaggggaaaattattgaaggtgtcaggtttttcataagcatgagtacagaactgagcagggagaaagactttgggcccaatgtctgaatatcaacatgcacccccgtttcctgcatttccaagatgtccctgaatggtgtatccaaaagatggcaaatttccctcctcagtggggtcgtgggctagcagatgagccccttgggtttcccatcacctcccatcagggactgtgatgtctttgggggcagaggggtctttgcctccattcgccattttatttgggagatttttcaacatagcctgactgggaaggcccaggtattcggtttgagatcatattgccttattccgactgcctctccagcctttggagggaggagcccttttctgctgtccaactgcatgcctgcagcaagaagacaagagtccccagtgcactgtgagctgaagaaagtaaccaatatttattgggtacctcctatgggccatgccctttgctaagtgcattgtcaacatgatctcatcaagcctcctactaagtttaggaggggagtgttgttaccccatttcacagaagcagaaactcaggctcagagaagttgggtgacttactagtcagtgtgtggagcagagactctgcccatgttctttccctcaaacctggtcactgctggggcccccagggcctagtcctaagggttattgtccaagccccatgtagtggtcaggctggatctgggctctcctccaaggcagggcttttccagaaggattgcagggctcagacactggagctgcccctgccttgacctgctcagcatggatgtcaaaacccactctgaacctggtccctttgccctgctttcttctcctcccccaccctcatgccctcatgtggcatcgtgcctgcctcaggagctctccttgtcctatgtagatgaagcaggcatgattggcaggggtctgctctgccctgcctcagtccccacctcttctccaagctgtgccaaccctccgggtctgactgctgcccctctctcttaggaaacctctgccccagcccagggaacacaaggagcctctccaaggcagaggaccctaagcacttcttttttttattattttttattttattttaggttctgagatacatgtgcagagtgtgcaggtttgttacatagctatacatgtgccatggtgctttgctgcacctatcaacctgtcatctttttaagccccacatgtattaggtatttgtcctaatgctctccctcctcttgcctcccaccccccgacaggctcggtatgtgatgttcccctccctgtgtccacgtgttctcattgttcaactcccacttatagtgagcacatgtggtggttggttttctgttcctgcctaagcacttattataggccaggcactgtgcaggcacctcatcatctcagtcagtctgcaccgaactctgtgcagtagatattattatatcctcatttatcagattaggaaactgaggtgaagcaagttgtccaaggccacccagctgttaaatggcagaagtgggatttgcacctaggtgctcaagtgcattggtttgccaccatgtgctcaaagagaaggggcacaagagcctcatgaagaaggcatagctagcctgacagtccaaaggccagcagccgctgtggccatgactcacacacacctgcctcctcccagaactgccacgtgggtcctcacagctctgtccttatcaacacttactctcctttacaggtagcctaggccccagctcccagctctgttcgaggctcgcagaggggcggtagtgaaggggtctcatttctccaggatcctctttgctctctcgcccggtcctggtccagcttccctttcaagcatagtgaagtgcatttgttagcttgcagccaaccctgggaaatcatgagaatttgttcccaagtcaactcattctccagcgtccacagtgacgtattcactcacccagttgagcgcctagtgtatactagaccctgtgacagcaacaggagtgcaaaggtgactaagacgtggcccctgctttttttttttttttttttttttgagacggagtctcgccctgttgcccaggctggagtgcagtggtgcgatctcagctcctcacaagctctgcctcctaggttcaagcgattctcctgcttcagcctcccaagtagctgggactacaggtgtacaccaccatgccggctaattttttgtatttttagtagagacggggtttcactatgttggccagggtaatctcgaactcctgacctcatgatccgcccgcctcagcctcccaaagtgctgggattacaggcatgagccaccacccctggccggccccgcttttaagagaggggagagaagacctgggccttagaagagctcagaggaaccacaattgactctgcagtcaaggagaggaggctcactgcggatgtggtatttgagccttgaaggatgagtgtggtttcatcaagtagaaaaggcagggatgggaaagggaggtggtccaggcaggggtgatggtgtgggcaaagccttgctgatattaaagaacatagttctgtgcacctggaacactggatgcatggggtgcattatgaaagatgggactgaagaagtgaacttggcttagatcccatgtagtaggtctgagaagtaagatttaacccaaaggttgcaaaagaaccatgcttgtgataaaggatgatggattggggaaacagagaaaaagacagacagactgtaggaagggaggtattagcaaataatcataacacagtgtgaggtgtgcattaatattcactcattccaagtattgatcaagaagagaggtaggtactgggttaggaaacagcttgggcaaatgcatggggaaatgagagatgtcaagatgcattctaatggcagcctcttgaagatcttaagttgtttttggttcactcatttcgcaaatgaattcatttagcaaaagcactatggatacagtgcttacctctaggaagtaagttttagcccaaatgctgcagaaggatcatgcttatgacaaaggatgatggactggggagagagaaaaagaaaagacagacagactccaggaaggaaggtcagtctgcagctccttatagtggctaggagaaggagtctaggcagatacgactcaattagcttcatctgctgtttgtctctcaaaatctagacatgtgcactgctctggctggcccacctatcctgggcattgagttaagtgtgggggctgtgtgttgagagtccccctccattactggcaggaactccacacctcagacattgagccccaggtctgcagggagaagacgtgcttgcaaagtgagctaaaagcaaaacagcctctgacctggcaagcattcccaagtctgcacgcctgcagccagaggagagggtgatgccaggctgctgctcagatgcttttcagccatacccaggccaagacctggtgaccaggcagccagaaggagttccaggaggcacaaggcaggaagttgggggattaggaggtgtagaatggagaatgctctggggagatgggtgctttgttggtgcaactattcgtttattcctccagtgaccacgtgagcagtatggctgcacacacaggctctgcagccaagctgcctgggttcacatttggtctctgtgctttggaaaatttcataagctttctctaccagtttcccttattacccatgagattgatgtgaggattaacctagcatgtagtaaatatcctataaatattattattcaatagtgtacttctttgccaggaacaaaattcacctgttcctctttaaatgtcctccagtctgtctcctgggaaagattcttgtgagctccctggggacagggaccatattttgtttgtctcactgtatccgtagtgctttttgctaaacgaattcacttgctaaatgaatgaaccaggaacaacttaagaccttcaagaggctgccattataatgcatcttgacatctctctcctttccacatgcctttgtccgagctgtttcctaacccagtatttcactacccctcttctccatcaatatttggaatgagcaaataccgttagtgcatacctcacatggtattataattatttgctaatgcgtctgtctcctccatgactctgagctccttgagggattattccatgttgtaccccaggtgccccatgcagatgtgtattttgtgcactgttctgtgtaggctacaaaggaaaaggcctagcacctgcccttggggagctcacccacccaggatggacagaggtgtgcagacagagctgcagggtgggcacaaagggtccatctgctgaagtcctgcagatgcagccccgagcttgtccctcacgtcagcagcctggctcctggtctcagagagaactgtgtggttcccaagcattcactttaggaagaatcacttgcccctccctggctctctgcttcaaggaactgtgacaaccttgggatttgcaaactctctctttaatccttaagaggaaaatgttttggtaaaaagtcaagattagcagatacactcgggtgaaattctttccctggaaataaagaatagagccattaatatccacagtagagtgactttaaatgcccccggggggtcagcaggaaccagggccctgaggaaaggatcagcgtggggaagaggctcccacttccctgtgaggagctgcacatgcagtctcactggagctccctgctgcaatgctgttgcctgtggtggttggtgtggatgctgcctgccaagagccctgattccccaggaagagagaaaaaggcttctctcaggacggccctggtcgcatctgcctgtacaattcctggagcctttggggagctgaagtcaggggctcaagtgcccctgggtttcctggaggaggcaggtgtggtgagacagctgacagacaggagaagggatgctctgaggaagtgactgtccagccatgggaaccagatggcccctggctgtagtcctgatgctgccacttgctagctctgtgaccttgagcaggttacttcacctctctgagacagactcactgtctggacaatgagtaaaaccctacctttcctgtctcagagatttggcaatgggacccaatgacatcaattggaaaggatgctgtgggtgaaaggtaacctttcaggacagcgacaagcctgtctgggcaggatgaatgggctgtggagccctgtatatcctagctcactctttgaacctcagtttccacttcttccctttttatttattgccggggtcttaaatgagtgttgggggtatctgattctccctctgcctgtacttttggggccaagcactgagctgaaaagacaattcctcctagttctccaagcctacaacctgccccctaaccagctgtgagctgtaatacattctccagtgtcactgtgaggtttgtgccttcacccccattttatagatcaggaaacagaggctcctccaagtaaaggagcttgcctcagatttcacagccaatgagtggaaaagcctctgggattcaaatgtcagagcccatatttttcctacttctcgcacctgttatcatatgctgcctcttcctttaacctgcagttccctcccttcacctccaccgtctcaatccttcccactctttaaggttcagttcagctatgacttcttctatgaggctctactcattttctcagatttcttcctcctccaaatttcttgtaaaaattatgttttttctctgattctaaaagaatgcacattacattagaaaagatacacaagcatacagaagataaaaaccacctaatatcccatcacccagaagcttccagtttttctttatgcatttgcatatgcatttgtgtttacttttccccaaaagttctccgatactttgtcctacttttcttttgacccttataacttcctgacttcggtacctttctgatttgccctaccagagtgtgagcccctggaaggcagcctctgcaccctgattcaggttgccacacatatgccagctcctagtgggctggagggaaggacatgcggttggggaactggaagactcatgctttcagctgtgtgcttcctccctagagtgcaggcagaggaggaatcgaatcccctcagcactcttgtaaagaccacagcaatgagtgagagatggtgcctgccagacataccattctttacttttcagcttaaaacagatacaaagtttggggaggctcactggaggaggcttggggctacactggaaagagaagaacttggattcacaccccagcttcccctcttcccagctctgtcacatttgcaaactctgagtctcagtatcctcatgtgtaaaatggggatagggtttatagggttgtaaggatgagatgatgagttgtttgcaaacaacttctcacagtgcacagtgaaggtcagcaatgagagccagccccgccctttcttctttccaaatgattaatatatctgttaccagcctccattcattatatagctctgtcatgtgctaagcaccatgggggctgaaaaagatgttcttcctgccttaaaattccactggggatgaacaaattacacgggagctgatcagagaggaaggcagtccattatgagggctaattgagcagtgcagaccatgttgcaaactgagttagggcctggagagcttactgtgtgctggggtcctcaggaatgccacagatgcatcaataaccacctctgctactctggaagtagtcacatcaggaagactccagagataagcttatctgggctgtggccacagagctggaatttgtaagctttaggtttctatgtctcatgttaccagcttgtctataaattgtaaattacagccatctgatggttagggaatatgaagtttggttaagagaatgaaatgagaccacgaagattagagaacaggaaaagaggggactggggactacatacccatcagaatcttcattcagtcctgaccctcagcaggagggggatttcatcaggctcatttccatccttgatttcgtccatcctggttctcctgacaaggggcatttatcagagttatggcatgggaaatcacaggggagtaatgtaccatggcatttaagagtatgaacgttggagtcggagctattttctccgctacttactagctgtgtgactttgggcaagttacttagcctttctctgagcctcactttctttatctgtaaagtgagggcgatcagaataaacctccttcatatggttattttgagctttataaagagacaatactggctgagcacggtggctcactgccagtaatcccagcactttaggaggccaaagctggaggatcgcttgagcccaggagttggagaccagcctgggcaacatagggaatgagactcctgtctctacaaaaaatatacaaaaattagtcaggcatggtggtacgtgcctgtaatcccatctactcaggaggctaaggcaggaggatcgcttgagcccaggaggtggaggttgcagtgagccaagatcacgccattgtactccagcctgggcaacaggagtgaaaccctgtctgagagagagagagagagagaaaatactactatggtgcttataaaagttcaataaattttagctgttgttagtattattaaagtaagatctgtatgaaaataaagcagattttttcccccaaatgttcatgtcagaagtatatatttcattggcaaggggctgcttctggaaggttgagaggtatcctgggggaggggatagagcactggcaaaattggcatcacaattcaagtcacctcactcagtgttttttaagttatcaaaatccacagtatgaaaagcatttgacattacagtccactatatttatgcatttataaacaagagaaaaaatcacgaaaaatacagtaccacgtgcagtacacactgattccatctattctttttttttctttttcctcaaatgcacttgccgcctacttattccagacccaatgattgggtccctatccacagtttggaaaacactataagaaatgattgtgtcctctcactttccctctctgggatttagttttccaactataaaatgctcctgatgcccagccagcctcaccgctgctccgagtcaatgccaggaacgctgatttagcacatgctatttggagggtacccatccaggtgctgtgggagggacagagattgagaagagtgctttctgaccccacagaggccatttggaaaccctgggaatgggtgggagggttggaggtggggattgcttctcccctaagactcagcgtgatggaaaggcaatggggtgggaactaactggtgttggtctgtcccatttgtgtcccagcagccttcctgacagcgagataggagaggaccccaggtacagccttgggactgggtcagaagtgggtctcaacaaagggaaggggtagggtgggggtggaggacttgtgggtgggtaatgctgagtatggattcagggatgtgcagcctacatattttcagagacatggggctaaggcctgcattctcaatgagggcaaaatttggttcttggggacagaaaacacttagacattgcaatgctttgtggctgtccaaagtaccaaacagatgccagtatatctgtggtgctgaaatttcatggtgaatggagtcagaaaatagactagcgattgccagggtctggtgggagagagagggaagggactgccaatgtgtatgggatttgttttggggaagataaaaatgttttggaattagatagtggagatagttgcacaacctggtgaacgtacttttagtttcagaggttttctaaacctctgatttttttttaagtgacaggaaagacagaaaaaagtatatctaaaaaggctctaggggtgatcatggaaaagaaagttaagaaatatgactgtaaggaaaggagatgggtgtccctcaggccaggcagaaaattcagtcttgttgctttatgttcatgtgcaaatctaaaaaatccaagtgatatagattaatgaggctctgagtccctcaaaaccttccctccccttacctctccaaaaaacacttgagataccctagaggtggtatgaagtcaggatgggaaggttggctcagctttgcaaataagtttaagcctctggcctttgctctccaacaccaaagaggcttcactttggtatattttctctgccctttctccctccttgtccccaactgtcagtatgtgatgacaggctcagcctctgtaatggtagtgatcatatttcttgagccaaaaatcagacctcatggcatgtgacaagtttgcatatgtggatgagaacagagtggcagaatatttgacacgggagcagcttgggcagtccagggcacatggcactgcacctgacatccctggcagatcccccacattccgtggttgtcttctgatggggccatatggggctgcagatcatgcctggagccctcgcagctccagggctgcgggttcccagccccagagtgcaggtgctggtgtcagcctgcctggcctggcctggctctgtccagagcactccttgccccagctgtttgtgcagctgtatcagcctcagacctcagcctattcattccaacctgaatgcagaggctgggtctggaggagccacattgcgggcttcatactcctgatctgacaagttttccccccagagcctgcaccaatggcacctctccccattctccctcttaactgggtcctccagggccctcctcacacacccacgtggtcaggcagcagaggcttccccaagatgggcacaccccactctccacacctctctatgcagcatttgtggctacagactgggtccaggggattgtaaaggcatgctcatgttgggttggagggagctcaggatcttcctggaggatatggttcactcccatgagagctcagtatgcctttcctcccctgctgcagcccagagcgggagacagcgaccgacttggatatcaggtactgcgtcctgggaacattgccccccagggtcaactccctccagggtgctctcaggcccaagggagccacatcaccctgctgggcagcccccagaccccagccccagtgttgggggaggccagggagggcccctgtgctccaccaggtggctcgggagctgctgctgtttctgtgcatccatttactcccttcacataagatcatttttatctgggatctctttttcttttttcttcaaaaaccacatcactcaaaatgtggcttccttggctctgcttttaaaaaaaaaaaaaaaagttcttccatttggagaattacctgctgacttcaaagtccagtggcttgagggctacccaaagagggaggaagccagaagttgagtgttcccttggtttggtcacacttttgggctcctccctgactaaggaacaacagactgcagggctggggcaggctgggtgtagggcagggaggggatgaggtcctgctgccccagtcagttgagacccagacctctcaaacctgcctgggggaaggcaaggccaccagaggccacactaagcagatttctaccaactgcacctccccatccccttgcctccatctgagccatcagcttgacaactgcctctgagaacaagcccctgagaatgccttccgcaccccctactcccgccctgctttttccaggaagagaggccccgtggcctatgcttcgcagaaaccatggctgctaaatgccactgtggaggagaacatcatctttgagagtcccttcaacaaacaacggtaaaagcctgtcggagggaggcaggatgtggaggggaggaactgtctctggccagcctgccccagttccgggcccctccatcgatcacccacacccagccatctcactccccaggtgcttacctgcactccagcctctccatatggtgcacctggagaggggccaggtgtgcctgagcattggggcaatccagctcccataggggagagggcaggaatggagggaagggagagagccccgctgccttttctctagctggtgggagggctagctagctctctctgtgagtctccattcgcctggctcctgcactattttccctccaatgataatagttagggctagcatcgactgcgctcttactacataccaggcacagtgccgagctctttgtacacggaatttcctctcatgcttacaacaacctcagtaggtagatattattgttattcccactctacagatgaagaaccaagtttcagaaaggtcccaaggccacccagccagtaagtgaccaagatgggtctcaaatccaaagctgcctaacacctaagtacatgtttgtcaccaacatactctgatgcctccatgaactctggctggcacctgcccaggctaagggctggctggggaagtatgagaggaacaggctgggcaaatatttgaccagccatcatcattactgcctaaaccaaccagcagtggttttccctgcagtgccccaagcacgggttccggctgcagcttttcccactgcacagagatcatgagcgccctttcatcacttactctgcatatttgttcccaaccaattccatccttctagtatttaacctgcccaaacgctgtgtgaagtgctgacctcagctcttttcaagctcacacggtgtttgcttgcacccaagcgggaggcctattaaagccattgctcaccctgggcatagctacccagagactaatgaccctctgcaagtgctcgggccaactctgaccaggctgaccagctgcatcccctgcctctacccacgccaggtacaagatggtcattgaagcctgctctctgcagccagacatcgacatcctgccccatggagaccagacccagattggggaacgggttagtagcagcctctgaggggttttttcaaagccaggacccccaacctaccatgccctgagacactactcaggacaatgggtaactaggaaataggagacattgaaggctgaagagttgcctgcagtaaggtcaaacatgttgttcttgatgatgtcctttgacaggttttcagtcctgcttggagggcaaggtcagcttagtgccctcccaggctggggatcttcttcatttgcaccccaggtatacactgagagcccacacagcactgtgctcagcctggggttgtattgttcctgttcatcctccagatggggtcccctccacaagcttagacgaacaggattctcctgtgactgtcctccttttgtgtgattttaatccctgctgcctctgtctttgtttgtactggtcagatggtccctagcgcctacacaatgaatctttaaagacttggggctcatgctgccctcttctgaatgaattcagtaaacacgtgcaagttccttctctatgcaaggtgagaagcaggcaaagaagtggatagagccaggcctccatcccaaagagctcatagtccagtagggtacaggacagtgtctcctgaatggctgagggcatgatgtgttcctcctctttggtgacagggcatcaacctgtctggtggtcaacgccagcgaatcagtgtggcccgagccctctaccagcacgccaacgttgtcttcttggtgagtgcaagttcccttggggtcctggtctctggctgcctcccaggcctaactgcccacctccacctccccgcaaccccaccatcatccaacaatctccctctccaggagtaaatccctcctgccagagatattgccttatcatcctagtgatagggaaactgaggcaggcaaggatagcacaaatgacccattgcagacttcagatggagctctgcagtagccaatgaggagaggcaagctgtagttataggctgcctgtctgtgggacagcccaacccctcaacacttatgcagcccgactataagaatggctgataacagaatgtgtgctgccacttcccatcttatgcccagtgcagacattgctaattgttcacagcattatttcccatggaacttaactcatcctcagaatccttctcaacacagcactccaggtaaccactagccatcaaacatgagataaaactaggccaggcgcggtggctcacgcctgttattccagcactttgggaggccgaggcaggcggatcacgaggtcgggagatcgagaccatcctggccaacacggtgaaaccccgtctctactaaaaatacaaaaaattagctgggtgcggtggcgggcgcctgtagtcccagctactccggaggctgaggcaggagaatggcgtgaacccgggaggcggagcttgcagcgagccgagatcgcaccactgcactccagcctggggacaaaccgagactttgtctcaaaaaaaaaaaaaaaaaaaagaacgtattcgcaatccttacactacttcatgtcaagttctgttgtgtcaggtgccttgactgacactgaagaattctaagaaccagtccttggcctcaaagatttagaatctgattagggagacagagctcacccagttcaagaggcccagcccggttcaaatccaaactgtgcggcataaactatgagggggccttgtccagggagacaactgtgagggctggagtaatcagggagggcttcctggaggagagcctcaaagggagagtcaattaaacagaaggaaagagggaggccatttgcacagtgagttggaagaaggaagctcaagtctctgattccagctttattccctcccctctccctacaccacacgcacaagcactcctttactaaagacacttcacagtgggaagattcagtctccgttaccgtctgacacacacacagcgttttacaaagcatgggtgcattcgcgatctctcatgagatttaaacaaccctgctagagaaaagtgaagtggacattttatttcagtaaacgtttatgaagcgtctactctgtgccaggcactaaacgtttatgaagcgtctactctgtgccaggcacaggcacaagaagtctcagttcttgggagtgccataatcaggaatggacaaacaatgatcagatctggctttgcgccagtgtcacgggaatagggaggaaggaagggtaggcgtgggggtcaggacaggatgcaggaggaactggtgcttaggtgagcgaaggatgggtgggagttcacaaggcagacaaaaggcagagcagcactccaggcagaggaacagctcaggagaaggcccagacggcaggcttcctgggaacctggaatgcagagtgctgggaaagcacagatgaagcatgagtctagaagggaaagcgagaggttataaagcacctggaacaccagcccacagggtttgactttagagatgatggggagccgttgaaggtccaggagtcaggcagtgaagtgattagatctgtttgagagtgatatctgacaactgccccattttaaatgaggtaaccaaggcccagagaggttgggtgagttgtccaaagccacacagctaactagcttcagtccctagagcagagttgatagaactctaatgggttttatactcattgtcacccctccccaccatgcctttccctaccctctactctcttcctctcccttctgcccaggatgaccccttctcagctctggatatccatctgagtgaccacttaatgcaggccggcatccttgagctgctccgggacgacaagaggacagtggtcttagtgacccacaagctacagtacctgccccatgcagactgggtgagggggaacaagggggtcaggctatagggggcagggctggggaggctgtcaggcatcttggcaggaaccaatccgttgtcttggtagcaactgctgagggccacaaagcataagagaccagcactggatggctttatgcatgctgggcatttcagggagaccctgtacaggccaggggtttggtatcacctagacccacagacactccccatcctggcccgggccccccatggtacactcaaggctggcaccaagaagtctcaggaataatcaagtgctcacttctcaccttctgattcctgcccttttgatgacccatccccgcagtcatggggagtgcccatttggatggaaaagccctcttcccaccctatgaccttcccggggtggatggatgcaccaccccgggaatcatatgggaaatatggaaccaaacaatagcagtagtaatagaaacttcaggctgggcgcaggggctcacacctgtaatcccagcactttgggaggccaggacaagaggatcacttgagcccagaagtttaaggctgctgtgaaccatgatcatgccactgcactccactacagcctgggcgacagagccttgtctctgaaaatttgaaaaaggaaagaaagaaagaaagaaacttcaatattatcagtagagtccaatgttgtgaaacccctcattaactaaatttccatactcttcagtaggtagaaaataattactttttgattcattagaaagcacttaatttttaagatggagatcatgtaattttgaactctaggtcttgcctactcctatataaattctcctctaaacaacagccaaaattgaggccctctttgagcttcaggctggtgccaaatggctctgcttattttccccaaaataaatcttccttccatgtatgatgagaccccctccagtataaagaagacccaaagaaaatcacccaaagaaaaaaggcccaaagataagacccaaagacctaaagatttaaatatatatacagatacagaaggtttgtttctgagtttctgtagtgaccttggcaataccttgtagttcaggacaatcctgaggaacacagaagtgctggcttccttgaggaatcagtgatcaggactctcgagccccttgaaccccagcatagggcgggagggggtgagggcagcaggggtgggtgtctgaattaatgtcaggtctacgtgatggtgtcatcaagtgttccagataaaaagttttattgagccgggcgcggtggctaatgcctgtaatcccagcaccttgggaggccaaggcgggtggattgcttgagcccaggagttcgagaccagcttggggcaacatggtgaaaccctatctctataaaaaaaaaaaaaaaaattagccaggtatggtggcgtgcacctgtggtcccagctactcaggaggctgaggcaggaggatggcttgagccaggaagcagagattgcagtgagctgagatggtgccattgcaccccagcctaggcaacagagtgagaccctgtctcaaaaaaaaaaaaaaaaaaagatttattgattccaaagaggcatggccacacacacttagaccagcaggtgctttgctaagccctgatggaggctgccagacccgccgtcaagaggagctaagggtagtgtacaatgagcccacttagtgtatgacggccgctgccgtgggtggagtccttgtgagtaaccagccagcttgagcaggatgcactaatttgctctgcaaacccagccattgagaaatacgcctcagatgtaccgaactctaggtcctaggagtatgttggttggggtaggttatcaataccagcccacttgcagtggatgagctggtggccatttgtagtgaggaaagggatgtgtcaacctccatcttagactccacaattgagggatgtgaccaccattcctccccagccagcccccaaaccacgtttgttgctgcctttccagatcattgccatgaaggatggcaccatccagagggagggtaccctcaaggacttccagaggtctgaatgccagctctttgagcactggaagaccctcatgaaccgacaggaccaagagctggagaaggtgggtatatccagggatggccaagcagccacccctggatgcaaaggttctgctagaacctgaactcataaaggtcttcctgtccttagtgccccaggaagccccctaaagggcagatgtgggagctgggcatgaactggctcctaccagaggagagacagtacctgtgccaggtgcccagggcagaatcaggtgggcaccttcgccttatcctgaggtagtcagatactatttagttgcaaagtttcagaaaatcaactcaaactggcaaagaaaactaagcaaagaaaacaagagggaattaaggatttattgacccatgaaaccaaaaagtccaggtgtgtcatagctttaagtgtgctggatccaggtagtcagtgtaatcagaaatctgtttctcccatctcttgactctgctcccctcaaattggctcagctcccctcaaattggctccattctcatggtatcagtgagggccaccagcagtcttaggtttacattctcccagctcaacaactctgccagaaaaaaagtgcctctttccccatagttcagcaaaagtcccagggctgagtctcactggtccagtttggtcatgtgcccacccctgaacaaatcactgtggccagcggtgtggaatgtgaggattggcctgtcctgggtcacgtgccactttgggagccagatccacctgaatcacagagactaaaaacaggggaagagtggttccccacagggatatgggggtgctattatctgatgaaggggaaggactaaatcctggcaagatgaatgtgtgtctgtctgcccctccctcaggcagggacaaagtagaaatctgacattggtcatcaccagagtagttaccccttaacttccccttcccccaccaaccatatatcctgaagacattgcccaggccacatctgtcttttaggagactgtcacagagagaaaagccacagagccaccccagggcctatctcgtgccatgtcctcgagggatggccttctgcaggatgaggaagaggaggaaggtacaggcaatgggactgggagtgaaattatggcctgaggtctgatcagccacagagaggctaaggtttggggttctgggtgtggtgcagtagtgtgcctttgattaaatggcttccctctgtgtgcccccgttgtcccctcagtaagtggggataaaatgccctgattcaccctcagagggatggaaatgtgtagccacagagtgggttcttgcggcctgcagaggaggcagctgagagcgaggaggatgacaacctgtcgtccatgctgcaccagcgtgctgagatcccatggcgagcctgcgccaagtacctgtcctccgccggcatcctgctcctgtcgttgctggtcttctcacagctgctcaagcacatggtcctggtggccatcgactactggctggccaagtggaccgacagcgccctgaccctgacccctgcagccaggaactgctccctcagccaggtgtgactggcggcccatggcagaggttgggagtggggatgggggaagggctgagcccatgggcaccctggaactccaaatcactctctgcctgtgaaggagtgcaccctcgaccagactgtctatgccatggtgttcacggtgctctgcagcctgggcattgtgctgtgcctcgtcacgtctgtcactgtggagtggacagggctgaaggtggccaagagactgcaccgcagcctgctaaaccggatcatcctagcccccatgaggtacccgtctcccctggccaggctgggactgtgagcaagtcactgttctctgagccttagtcttcccatctataaaatggggatatacaacctgtcacaagcttgtgggggtgactcaaggagacagtgtgtgtaaaagtgccctccttgtgcaagaagcagggagaaactggcatttactcagccagatactgtgataggcattgtgtgtggttagctcatttaattgttaccatggccctttaaagtgagcgtctgcacatccaagtaaagattgttttctcctccctaagtgggtgtaatttgcccatccccacccatgagttcagctccctgccctcccctcactctctctccctcagccagcctcaggttttgacactgggggaacaggtagctgttctattaataatttcctgtaatgggatggataaaaatctcaaaggccacttgatgtcaaagaggtttaaagttgtccctgcccaattggttggccaacttggcttaaaaacacaacaggcaaacagattttctggccccttgtcgaggctagacctcacaatctaactgcactttttactttccagcctcatgagttttctgtggcccacagatatggcctccaagtttatttacttttactctctatttgccccagctctgtagttctgaaactccctggttggggttgggctgactctgggtcagccagccggcaggctgtccccagggccctgttcctcttggcaggttgtccctctggagaggactctgtgtcccaggaggacagctgctgagtcaggccgagccggcagctgagaaaggcggcagtcgtcagatgggcttgagaaactgaaaggctaacgaaaggccagcgcccctttgggcagctgcaggaattcacggggatacaggccagatgtctacaaattggcagaggatgccagacccatgaatgactccagagacacttacatgaaataattaactatctcattcagtaaacaggaagtaaatcaatggacaaatgagtaactcttcctctggctgcctcttaggttttttgagaccacgccccttgggagcatcctgaacagattttcatctgactgtaacaccatcgaccaggtacagaggaccgtgccacactatccccccttccagagacacctcggacccctgggggcttctcctgtctgaggctgggttccccagatcaggtgatcacagccctctgggaagaagccagtgtccccgatccgattataatgctgcttcagggctggggcctccctcgtgggagcctcacagtaaggctgagggaaaccagatccctttagcttccacctgagatcccactggctttctctagtaaagttccagcatattctgaaccaaggtggctgattgtatggagaatattcattttgattcagcctgtgttctttatttaccattgtaccagatggtgtgaaaacaaaatcttgattcctacctcagggagtttaccttgtagctggagagatgagatacgtgcctataataaagggagagcaaggccgggctcagtggctcactcctgtaaccccagcactttgggaggcggaggcaggcggatcacttgaggccaggtgttcaagaccagcctgatggccaacatgatgaaaccccttctctattaaaaatacaaaaattagccaggtgtggtggcaggtgcctgtaatcccaactacttgggaagctgaggcaggagaatcatttgaacccaaggggcagaggctgccgtgaaccgagattacgctgctgcactcaagtctgggcaacagtgagactcagtctcaaaaaaataaaggatcaaaaaataaagtgagagcaaaacatggcggccagtagcactctaaacacagtcaataccaaaattcacctcactctctccccctcgtctccctcagcacatcccatccacgctggagtgcctgagccgctccaccctgctctgtgtctcagccctggccgtcatctcctatgtcacacctgtgttcctcgtggccctcttgcccctggccatcgtgtgctacttcatccagaagtacttccgggtggcgtccaggtgatggcctcaggggtgaggggtgggaggtgctttgcaatgtgcagtttggtgtacttgctagactcatcgttatgagagtaatagggtcgtgttccctccaaaaaataaaaacaaaaaacagaaatgaaggaaatagaaatatccacatcttattccaccgccctaatataatagtctgccaacacacgcacacactgaggttgacatctgaattatttccttgggcgatatggtcaggactggaattgctaggtcatgataaatgcacattttatgcccttcattcattttgccaacatgcttcccaggagggttgcatcattctagtggtcaggctgattgctgatgcatgaaatcggcgggcacctgattcaagcagtgttatgataacacctcccagcccacgtgagtccagagtgtagctgtaagccttgacttgagggagcctctcacagccattctcatggatcacatttgccctcatgagctttggatccatgcacgcctctttcctcctcaaaattttctaagaatgttctctagggagttctttctgggagtgattctcccagattcatagaaactcatagattcaaaaaattgtaggaaaaaatttaaagaacgtctaggccagtgtttctcaaactgccaattacagcccatcagtgggtcatgaaatcaatatcatggatcacaaccagcatttttttaaaaatgaaaaaaacatcagactgtattcatagagtaaagcaagctttgcttcatgaaacctttgtgttggtcatggaggtgtgtgagtactgatttgtgagataaaatatatttctgactgcaggttgtggtcagaaaggttaagtacctttcccaagtgcacatagttggctagaaactagagttgagatacttattagcaataataaaatttagatgcattttggacacaattacctgccccaaaggatcaacatttgtataaatggctttttgcttggatgatccagaatggcccgacacccacacgaacaacatagctttttgacactcaaaaaattcaaagtgctgcacaagctgttctacaaagttcatttcttctgccagagaaacagcccagtctctgtggcacccagtctgaccctggagatggtttatcagggaaatcaacttcctgcatcccaaactggcctccctggcactgatgtgcttgtcgaggtgcagctttggggagcaggaggcaattctgttgccatggaaacctctggccttaccccgagacgaaacctatcatttcagcacatcactggccagggtctaaagagctccttgatggggtaagcggaagacggggttgaacgctttgagtttggtcttctgttcctttggccagctgtctcaaggttcagattgttcacctgtaaaatggaactagcactgcctgcccagccttagctcagctccaggctgtgcagcagaagtacagggacagatggcgacctggggttgacaatgcccaggacagcagtaattgtgccccacatcaggctgtgtctaagcattgtacataaacgatctcattcagtgctcacaaaagctcaatgggctggtggcattgtcttcccccttcacggggtaagaagctgaggcctagagaggtaaggccattcacccacacagcggtagcaggtggagctaggcttcaggcccaggccgagccctgagcctgccctcttaactgttccactctgttccccgccacagggacctgcagcagctggatgacaccacccagcttccacttctctcacactttgccgaaaccgtagaaggactcaccaccatccgggccttcaggtacgagtccacattcccccaaggtaggagtggaacaggggtggggccagggggcacaggccatgagatttgattctcaggactccacttgggaaggccaaggacacgttctctctcaagctgcctcaggtcccaaggcccaagggatatccaccagcagggacaggccaggtgggctcccactgaatgttctagagaggaaaattccagctctgtagacaagcccaggacctctgtgaggcagagcatgaaaagagacaaagctgggacaagtcttcatgtatcaacgctagaaagggccttaggtgcgggccaccctaagcccttcttttattaaggagcccctgtgtgccaaacactatgctgagtactgtacaggccaatcccactcattctgcactgcaaccctcggtgctgagaatggtcatttccattgcacagacaaggaaactgaggcacagagacgttctataacctctctgtgtaaggtgccacaaagcccagacttgaacctatttgttcatgcaacaaacatttactaagccccgactatgtgctaagccccatgccaggcactaaaaagatgagtcaaataagccgctgccctgcaggcgtttacagcccagactttgagcaggccaggataaatccacgtgacaagtattctgaaaaaagcggattcaagggctgtgggagcatagaagagagacagtccgggaaggtttttgtaccagaggtgtcatcagaactaggactcaaaggaggggcaggagttcaccaggctgaggaattcctgaaaacttcagtgcccctgccatcgtctcactaccctgagtggtgatgttggggtggacaggagcatctgaggttgcctggggaatgagggaagctgttgtttcccactccccaagagtctgtctgatctccagaggcatctctcttccagtcaggcaggccagagacccctgacacacaaagttgggctcttttctcatcttcatccagagagtgataataggttatttttagggtggcacagctgcacgaagtatgacagtaaccatgagacaccaagcactgtgtccaggagtaaccatagggcacaaggaccagccaagggccagagaggcttacatctcctccccccaacccctgaagtccagcttcagccctggagaggtatccaggcccctctgcccaccctggagcacctagggccagtggaaatccacctcttagggatcttgtctaagtaaagaagagcagagcaaagctctgccctggccttggcgctgctccctggacatcccttgcccctggacaagcctatgctgtgtcttccacaaagaagcttgctggggactggattatgactctagagtctcctcccagcctcctcttctcaagcctgaacttctcccgttccttcaacttccaggtccctcgacattactgagcctagcctttgctctaagttttggtgatttccctctctcaattggtgtctcagagggccctggggtagagagatggtgactcttctagagtgggccacagccccttgtgtgcagatcccagcttcctgtaaacagcctcagatcaggccaaacctgtggtcagccagagccactgctacccagtgaggtcttccacaccctactgacacggtgaatgatttttaaatttgaatgaaaggctttttaatcaaccccatacacatttaatgcattggctttaatccagcagcctgttgagagctattagcacttattgattgcccacttactgtatgccaggcaccgtgctaagtgttgtatgtgcattattacatttaatcctcacaaggaccacataacataggtacgaatcgccacattctccagatgcagaagcgagacccagagaggctgggtaatcaatccaaggtcacacagactgcgggggctggcgctgagcttggaacccaggtttgcctgaccttctgggctttcctaagagatcttattttttcccaaaagagtttcaagagtgcccagcactgggctcagtggcgggctcggaggttgttttcgttcatgtaggaactatcacttccccatttttttcataagaaaactgagtctcagtcctgatacacagccaggaagttgtgatgttcaggctccaacctgggtttacatggctccgaggctggggctcttttctagtcctcagacacactgtcgcacgcctgtggcagaagctcccatctcacacttgccgaccctcaactcacacagtcctgagacccacatacgctgagcgcctcacactcctataacacgcacatgccctgatgcacacacattttcaacacgcacttactctacccttcaggcatggtttcacactcactgcagacacgtcaccctcccacacgtctccaccctgggggtgtgcagtagcatgctctctcccacctcagaacctcccttcagtcccctcagacacatgccctctctccacgcagagacaatcaaagctgaactaacaccttccagggtgaaaagcaaatgcccagtaaggtacgtcttgggtgcctccgtgtcccctgagtttggtcctatcaaaccagcgatgatgaggcagcttttctttcgttccttcctccatcatcaaacaagtgctcctgcatctcctctgggccgggcctacgtcagcaaggtctgagggaagcggccaaggagagtgatgacggcagcccaggttgatcagagaaaggaggcaggtccatgcgcagtaactcagggaaaacatgatgaggacctaaggatgagaaagaagcctccagagttccctgtgcagagagattccatcaatttcagagggtcaggggagtgccatgcattcatccaacaaatatttattgatagtgccaggtgctggggtatattggtgaataaaacatcttcatggaatttgcagtctattgagggagatgattataaatagctagagaaatgcatgtacagcagatactgtggagcaaacaggttgcagacaataataggggaaacctactttatagtaaggtagtagccaggaagagcctctctgaggaggcagcatttaaggcaagccctgaaggttgagttgagccagccttatgaagagcaagggcaaaagccttccaggaaaagggaatagtgtgtgcaaaggccctggggtagggaagactttagtattgtcacagagcttttaaaaagctgagtggctgcagcatagtgtgtggggtgtttgtggcaggaattaggttggcaggagggggttcttcatcctataagcagtggaaggtcattaatattcttttttatttgtttttttttttttttttttttttttttttgaggcagagtctcactttgtcacccaggctggagtgcagtgaggtgatcttggctcactgcaacctccacctcccgggttcaagcaattatcctggcttcctcagcctcccaagtagctgggattacaggtgtgcaccaccatgcccagctactaatttttgtattattagtagagacagaattccaccatgttggccaggctggtcttgaactcttgacctcaggtgatccgcccgcctcagcctcccaaagtgctgggattacaggggtgagtcaccgcatccggccggagatcattaatattctaaacagtgggggagaggacacagtttgcgatttagatagattaagccagccactgtgtggagcatggactgtagggagacagcaggtagacgtattcaggaagctgatgcagtagtccaggtgagagtttgtggtgggcaggaagcaggatagagggggagggaggcaaggactcttttagagagagacataagaggacttgccaaggggctgaatgtgaatccaggtgattcctgggtgagaaactgggtaaagggaggtgccccttattataatgggaaagacctagagaaaatggatcttggggtgaaaacaagagtttggaggaggtggggattctggacaggtttgaataagcagaaaggagtggggtggacattccagagagggatagcttacatgaagtggccacggtggcatgtctggggactggaggggccctggagcctccctctgcaggtagggagactcctaggagctatgtggaccaacactgttcccttaggagcttctcatcctccctccaggtatgaggcccggttccagcagaagcttctcgaatacacagactccaacaacattgcttccctcttcctcacagctgccaacagatggctggaagtccgaatggcaagtgctattcccctctaccctggcctctgataggagggtggggccagagcaagagcacacaggtacctggggatgaaagagaggataggataccagatcgtgtggacaccaagccttcctgcttcccccagccctggtggtcctcctagtgtctagcctgtgctccttttccccatatcactgcctggaggcttgtgtatctgaggtgtgtgccagtggcaagaacagttgtggtgaatgtgtatctgcagtgggtcatatgacacccacattgtgtgtgtttgtgggccagctgaggcgtgcatgttaaagggtgtgcaggggctagggggtaggggagcatgagcttgtgggacatgttggctcctggggctccagccttcgcagcccttgtgtgtgtctggtgacgtgtgcatgagttgcagggctggagtggaggcctggctgagctgctctctgccccgaaaaggagtgaggtagaacaggggcctgtggctctaacccctgagcgcccaggtcagctcctctccctccccaggagtacatcggtgcatgtgtggtgctcatcgcagcggtgacctccatctccaactccctgcacagggagctctctgctggcctggtgggcctgggccttacctacgccctaatggtgagcggcagtgggctagggcagaggaggggtcagacaccagcactcccggagcaccttcgtcactggagacatgagacactcccaggccttaccccaatttcatttgcatctgatgccagagggacagtgcgggcaggaaggctgaccagcaggccccagggcccaggccccagacaggtggaggttggggagccacatgactgaccctccctgtgcctccagggagggctgctctgagcaggcagtggatggcagcaaaaggaatctggggccctggcccctctccagccttaagaagagccattctggtggctgaggacagaactaagcgaccatggagtgtgcgccactggcttgctccccacaggtctccaactacctcaactggatggtgaggaacctggcagacatggagctccagctgggggctgtgaagcgcatccatgggctcctgaaaaccgaggcagagagctacgaggggctcctgggtgagaggctcagggagaggggtggggaagagtccaaggaggagtgtgtctgggttgggggccacaagggagcctggggatggggtggcactttcggatactagctgtggcccatgcctggtggctgagcccagcccggcccccagcaccatcgctgatcccaaagaactggccagaccaagggaagatccagatccagaacctgagcgtgcgctacgacagctccctgaagccggtgctgaagcacgtcaatgccctcatcgcccctggacagaaggtcagagcacgggcccaacccaatgctgcaggacaggcgtgagcaggggatggggcatgcacggagctggatggcttcgcagtcacctcgtggccctccagggccgaggcctctcactattcagacatcgcagtctcctgccctgggcctgtgggggcccatctttcctctccttctattgccttcccccagtgctgccctcaggccttgtcttctcactcatccaccaaggagaccgacactctggactcccccagctcacacgggctttgtcagggcctccctctctgcgaatggtcaggggctttccctagggcactgccccgagcttcagggcagggacctgggggcagacagcgaggccacccttgtattgagggtgagcccctgcctatggccctggcccagctctcctctcgtttcccactctgtctctttgtctctgtctcactttgctgtggctgtccatgtcattctctgaccttgggatgtacctctgtccctgcctctctcatccttctatgtcactatctgtctccgtattgtaatttctgttggtacccaagtgccaggaagcaacgggatcagaggtggctccattgtagggcggggcacacagacacatccatgcataccactctcagctgcccctgtgtcctcctgccacacccatgcccatagagacacaccactgccccccagctctccttcagccaagtacccggcacacccagacccacaccaaggcccaggcaaatggacatccatgcctgcacttgcgtgccggtccctgtgtaagccctctctggacccactgcaggaaacaagcccaaacctgtggtgtccaaagagaaactagtcagaaaaccaggccaaaaagataccctgtgacctcccacacctgcacacacacccagagctagcatagaggctattcccagcagccccagagtcccagtggcggtgcctgcttctctctttccagatcgggatctgcggccgcaccggcagtgggaagtcctccttctctcttgccttcttccgcatggtggacacgttcgaaggtgagttgtaaggcgggcaccccacgtgtacccacagccaccagatgaggcctcagccctggcacgtggtcagacatgacaggaggcccagcagtcaccgccttcccctgcaccctcactgggacccatgcagggcacatcatcattgatggcattgacatcgccaaactgccgctgcacaccctgcgctcacgcctctccatcatcctgcaggaccccgtcctcttcagcggcaccatccggtgagccccaccacccctcaggcccacccagccccaggccggctcagttccatcagatctggagcacaaagaggagggggttgggggagaccaggatcccagaggtgtttcctgctcatgcccttctccatcccatcaggcccaggcagcctctggaaggggatcccccacccatgggtctaagatgctgtcccccacccactgccaccacctcggtgcttctcccagccagacctccaactcagtctgctctcgctcactgccctctttgccgcctggggatgcaggcaggaccctgctccctccctactggggctttctgtgccacttccagatttaacctggaccctgagaggaagtgctcagatagcacactgtgggaggccctggaaatcgcccagctgaagctggtggtgaaggcactgccaggaggcctcggtaactactcctggctatgcagctgggttggttgggcactcaaggaccctgtaaggatggcagacagaagcccgtgtctcaggtttgccccaagtttggagtctgaagcctggcaggaccatttagtcctacttctcactatacgggggcccagagaggtcaggtgtcttgccccaggtcacacaactggtcagttcagggtctggctcctcctgcagggtacagcgggtacagtcagggatccttgtgagacagagattgcgagtcccccatgccaagggggcatcttcagccctgccctgccccatccacctgcatgcccagttctgccttaggggaggagaagatggactgggcaatcatagacacgggtcactcatcaaggccaccggtgattggcaaagccttggtatatttgctgcagctcctggagcattgggggtggccaagccttggtttcaatgaatcaccctaccaaggccctacatacacactcagtgcacccctcagtgcacacgccccctcccagaactgcccagggccacagcagcacacacctccaggggtgcccttctcgttgcagtccttgcagacggcctccacattgttgtgtcaggtgcaccagccctgcacacgcctgtgctcttggacacacacccacctatttgcccccatgcacacattttccaacagccccccaagccatcccatctgctccactcacagcacaagattaactcagtcctacttcatctccccgggctgttttcagatgccatcatcacagaaggcggggagaatttcagccagggacagaggcagctgttctgcctggcccgggccttcgtgaggaagaccagcatcttcatcatggacgaggccacggcttccattgacatggccacggttggtcctgggcccctccatgggaccatggtcttggaaagggtttagtgggatgctagggagaaatttgcacgaagtagtcctgaggctcaagttgcctctaacatcaaatgctatgtgttgcagaaaatgaaaagagctggggggaccctgactctgtctagtcttagggaatgttacacacacacacgcacacacaaaaacactatgcaaacacacacataagctgcacacacagacccacacagacttcacactgtcacctatcacaacagcacacacacagccacaaccacaacctacatacacacacagagctgagctcccaacaggctgagtccagtccctgagtgccgggaacctgttcagtcctgtggggtgggggtgggactaggatcggggtcagatgggagctgagccacagacctgggctccacatcccccaagccaggccagaccccatccactgggcaggtgagccaacagctgttgcccccacttggcaggaaaacatcctccaaaaggtggtgatgacagccttcgcagaccgcactgtggtcaccatcgcggtaaggggcccattgatggggtgcagagggacacccagggacaggactggcctgttgtggccgtcatcagtgcacagcccctgggcttgcctggtcccagtaatcaagaaagaaccctgaagcaggcagttcagggcaaggggcctggagggcatgcagggagcctgggttgcaggatttggggtggggggttttgcccctgtgcttccctcagacctcccctctccttctccaggttccaaggcctgcccctgtcccaaggccttatatgttaggctggcgttacttctccataggaagtgggggaggggttgtggagggtctctgagccttgaagcctggaggtggggtagagttgggacttggagaggagagaagggtggtattagcagatggagagcttgtagtcacatccaccccaggaaagtgcagtccccacagtgacaggacattctggccacatgcctcatcctcctcctccaagccgcaggagggccaccctcagctgtggcccccaccgcgggtggtattcccaccatcctgacccgccccctcctgccctgcccagcatcgagtgcacaccatcctgagtgcagacctggtgatcgtcctgaagc

SEQ ID NO: 15332 - DNA, 68765 bp, Homo sapiens
catcgggaagctgcccatcgccatgagggccctcaccaactaccaacggctctgcgaggcctttgacgcccaggtggtcagtgggggcacagccacaccatctattcactgccttctggtttagggtcacagagagggacctcaaagggcattaggtcaaaatcctggtgggacaagaggggaaactgaggctggtgaggggaagaagcttgccttaagtcacacagtgaaccagggacaggtgcagggctgaggattcataggacaggcacagttggaatggcccttaccgtttaggtcgtctagtccaaagtccttatccagatggggaaactgaggctctgagaagggaagtgaccccactggactctcacatccctgtgctctttcctctgcagcttactgactataaaggttggagtgttcacttgatttggagcaggggtgttagtggcctgatccttatggtaactctatgagttgagccagacaggaatctccccatatcactgaggagcaaattgaggccctgagaaaggctgtgacctgcccagagctggccacagctggcaggcggcagaggcagtctcctggctcccagtccagtgctccttcacttcctctgccctcgcaccagggcagttgctgaggcagacacggtggcaggtggtaatgagtgagtgtggcacatggccacctcctcattccagtgctgtgctcatcacatagtccctgaccagctgtgtgaccttgagcaatcatctggccttagtttccccatctagaccatgttggtgttgatagggccctcccaactgtgcacttgctgattccatgatctcttcctggagttcacctatttgcagaggatgtgaccactgggtttccccagacaacaggagctaggggcatcctgggaggctaggcccagccgtgaattagccctcaggcactctgacctggccatggtctctctgggcagcggaaggacattcagggcactcaaggtgcccgggccatctggcaggcactcagccatgccttcgggaggcgcctggtcctcagcagcactttccgcatcttggccgacctgctgggcttcgccgggccactgtgcatctttgggatcgtggaccaccttgggaaggagaacgacgtcttccagcccaaggtaggcagccccaggggtagggtaaggcaccctctagatggttttcagttgtttctgagagtgcaacaggccaatgtgtgtgagccatggccacactggagtggctcctcacacatgcgcaaagcccatagcagtatccccaccacagaatactctacatctggtcaacagaaatgccagagggcgagcctatgccccaagggtatcctactctcctctcaccgtcactaccatagtacctctcccggtagttaggtcagtccgaaaactgcaggaagtgcttttgtttgtccagtgtctagagcttctgtgacttggatttgttggctttcagttcatgtcatcttagtaaactctttaaaagttttcaagatctgtcttcttcagtcctgtaaaggctggcacttgagctttctgcaggggcatcttgggagctactgtcagaggagagagaagtgggaaaccctcacgagtggagctttgtctctccccactccaaatttcattcaaagctgcccgtagttttattaatatgttggacttttccattaaaatttcttttttaagaaaagtttccatggcttaaaaaacactggagacttattagactagattatatccaatggccttggcagttgtaacgattctgcaaactgaaatttgttggagctagaaaacctttccccggggttatttgccctgcgtggggccgtagcatccacttcgggggctgggcagactgtgctctgttgtctgtttccttgcagccgtttaggtttaaatggccacaaaatgaaaactttttcacccctaataagtttcagagttttagtttccaagtgaggatgtcattataacattttaaccacagacagtctgaaaataatgcagagaatggggaattagggtttttaataatttatgacaccctttgcgtaacatttgttcatctcatgagctccaaaatcgcagccagcagttaatcctcaggaggtttatgttcatttttctggagacataattagtcagctgaacagttttggccacagatatgagatacgttgagtctgatttatgcagcaaactttcattgaacactgctgtgtgccaggcctgggttgggctgtgggaatatgaaagcaatagttatgatgaggatgattaacaatattaacagccacttactgaccacataatacatacctggctgtgtgcaggagttatccatgtgttatttaatccctaaaactatcctttggcgtgagtatattttgcaacatctttactgtggtatacctcaaatactgtacagtttatgagatgataggtattcttatccccattttacagatgagaaagttgaggctcagaaagtttaagtaattttccccagggtctctcagctagttaataacagaggcagaatttgaacacaagactcactccacagtctgggcatttacagccaggaagctaaattgactattattatcaagccatcacctctggctccaaggattatgaaatccaacagtgaggagagaaatcaaaataaaatacttttatgctatgtgttacatgtgactcttaggaggaatattcagggaattgtgggaaaagatagtgattaacttagccagtggtcatgaacagcttcatagaggaggggatgtttgaaaggggtcttgacggatgagtaggaatttgccaggctgccatgggaagatttcttgctcaaccaagaatgcaaggaccacttttgcttatttaaactttgatggcttttgaagccatatctggctttttgagcctctctactttacctggcccataaaagagaggggaagcggctgcttctcttgtctacaggagtgtcacctttggctctagcctgaccataggctaccccagaatacccccattggcgatcctgaagcagcatggagccagttgttaatatcagggggaaatggcacaggccagagcccttatcagagtgtccacaccacgctcttcttcctgtgtttcccaaaacccttgtgggattctgctaaggagagagctctgaggcaggacgtgccaaagagatggcgaaagcacttagaattttagttcatctgaacgttatcattgccgtttttttctctttgtttatacacaaaccctggggtttattaccgtctcattggaatgctcttgtcccagttacttagcacacaaatccctgagacagatggccctgcctcagtggcagtgggccttatcagatttaatattttttccctgcagcccaaacacaatcagaaaatttccgacacagaaacaagagttgaaagtaaatatagtctccagtgtccgcaacaaagaactctccatcatgtggttgcctgggatgtggcttaattctcatgtgggcttctgagctcagaaaatgggggaaagggatcatttactgagatcatttggttcatctcccagcccccaagccattctaatccagagagaaccgagtgctattctggtctttatgaatgacaaagaaggaagctccctagctacatgttgcagtgtttcacagtctgggagaggaagccgttttttctgcccagcctgaatccatcctgcagcagttggcacagcgaggcacctgtggtttattcatcatcactcttccttcctaagatactcagagttggcaagaaacatgtcatccttggtatccgcaaggacgaacatttctgatgtcctctttagttactgaaagtgtctgtgacttgccagatctttgatgctcctgtcaccccgctgccactccccagggaaagctgggacccaggttgggctctgcctatgatctatagctctttccagcctcctctccaacccaacccctactcccaatctgtcacctcccatggatgccactgatctggctgaaggacaagagaattagattcataatgagctgctggtgtctgaaacctgccagcactgccctgggctatcagttgagccaaaggaagaaggaacagtctgggtttgatcgaagggctaaagcttcaaacagcctctaagtctcagtaggaaaatgtgtaggtttgggagggtgtatgtgtttccgaatgagttcccctaagaactgcttatggttctatatgtgtgttctgtttgtccctgtgtcttttggtgtgtctttttctgcgtgtgtgtgtgcatgtgtgtgtgtctatgcccccgtttggattgccatatttgtggctatcattatgagtgacttaatgagtgtatatgcattggtgtttctgtgactttgtggttttgatgcatgggctggcctcttcataaccatgtccatgcagctggtctggcctagagtacctgccttcaattcactagctccttcttggccatcaagactctgctcaaatgtcacctgctccagggagccttcacctggttgaattagatgccccttatctgtgctcacataacatcctatcaaagcgccctgtttctttccctgacttgatcctctgtcccctattgcctgacctctgtgtgcccagcactcagcccactgcctgacacccaggagatgcacgggaaatggttctgcaaagaaggaataatgcagcaattactatatattgagtgcttacacttactgttttttcacatgcactgttacattgacttctcataacaactctctgaagtcccttcatagcctcaccttacagatgaggaaactgaagctaagagaggttgaggaacttacctaaggacacagtggctaatatatgatgagtcaggacctctaagtccaggctcttaaccaccgtgtcaaacagtcttgtatgaatgggtaggtgtgttggtctctgggtggccaaagataattttattctttacccagggcctcccggggctgggacctacggacaactcaccttttgacacctgccaaaataggaaacaagagtccaagtgatcccctctcctttaagcaccagagaacatgtgaaggggacctttccaatcatacctctggcctggcagagacaatggggctccaaactgtagagtcgggagtgctgggttttagtcctacctctgcagctaactcatttattctcctcagcagtcacattctgcaagcctcaaatgcaaaatgtgtaataacttctgtagaaagtacatgggggcatgaagatcattggcttgattgcttttaaaaaatcggtattgagcactactggggaaatccctggaaacaaacacaattcttccctgagagcttgtgaaaatgcaagactagggcctatgattttccaaagcattttcttccaccaagtgtcaggttgtaggtccttggtcttttctctcttgccttggtacctgcagggtgctgaccagtgctatcatatcccctccccgtttcctaggaccctcttctcggtagactccaacagggcctgccttccttgggcagcatggcaggcctcttggctagtctagtacccacttcttttttttttttttttttttttggatggagcctcactctgtctcccaggctggagtgcactggcgcaatcttagctcactgcaacctctgcctcctgggttcaagcaattctcctggcccagcctcccaagtagctgggattacaggcatgcatcaccatgtccagctatttttttgtatttttagtagaaacagggtttcagcatgttggccaggctggtctcaaactcccgacctcaggtgatctgcctacttcagcctcccaaaatgctggaattacaggcatgacccaccacgcctagtcaggtacccacttcttaactgaaacttagctattccaggttctatcccttttaaaccaactctttgaagagaggtctaataatgacccaatgacttatagctgcagtgagatttttattttaacaggtcacaaaattctcaatccacaaaagtagatttctgaccctaggttattttgttgggggcggagagaggaagtcaaaggttttgcagcctttagagctgcaaaaccagaatttgttgttttgttaaaaatgcacaaataccgacgagtatatttaagtaacacccatagtctaacgaacaaacatgatcagttggcttttccagccctcattctccagcctgtgtgttttctgctcattgtaacacagcgtgtgtgtggcattccatgtttctccagagctttcatgagaatcagtggtcttggatgcatagtgttcccatgagtaccttaattacctaaccattccctgtggttggaaatttatatgggtttttgcattctccttctgctctgaccccaaaataaatgtctgtgttcatacagctattaccttatgtgaaattattttctttgggataaattctcatgatgtgttgttgctttaaaatagtggactccagtctccagagctgcgtctctgcagaggacagtgggacagaagaatcccagggcatgttaaaaaggaccgggtcttcctaaacccacatgcctatatttctgacccagtaccagccaggggggcaagtttccatcccccacaagtcacaaacctgtaactgacactaggatgcttaaggtcaaaggcctggacgaggcctagacagtgggtctggggtagtgtttttgacatcactcaggttcatgttcacatgttgtccccttaccagcatgtgaccttgggccagccactaaccctactgaaactcctttttttcatgtatgaaatggggctaataatggtaccctcctcattagggtattgtgaggatagagttttgcacctgataaatattgtctcctgccccttcctcccctggaaattcaggtctctccctgcagcctaattttaaggcccatttttctgcttccagcccacccctgcccttctaccttcgacctcctccctctgcctctccctctggtgcactggcaaatgggacagagagcctcggtagggccttcctcttagagtcttgcacgcatccctcagtggtctccctgtggctgcttcctgctgccaccaacagatacagacccctgtcgcacagatcatggtagagacagtggtgagcaggaccagacagctccagggagcagtgagggctggcttagagaacctctgttaaactgagaggccaccatcaggaagctctgatccaagatccaggaatccctgactctagggaaaggcctccaatgagagcctgggccctctctgcctgattctgattgtggatgtgccctcaaactccttctcatcactttgttccatccctctttaccctgcagcagctcccacaccctgccaaacaggatgcacagtccagggcagtgtctgagaaagagcagagatctgtcttcatggaaatattgatgtggctctgctggggagcaatggatttatcaagatcaaagttttcctgggagttattgatgcttaatttggaaatagacacactgttgatccctggtatctttagcaacaaagttaaaatgtttgtttttcttcactggttgccatctgagatcttgccggaagtacacaagagaaccttaaatttaacaggaggccctgggagcccatgaggctggcgggcttgggtctgaaatcttttcagtctcttgtaagtgatgagctctcattctctcctgagagctctacggtgccatgttttccactggccttttctgctcagtaattgctacattacaggctgttggtaagttcggaacaagggagctgctgattccatttctgtagcagagaacatgcaccgtgagacttgttgtaccagttcaggttttaggtgctctatttattcttgccccattcagaatgctctcccctgggtctgtggccacaatgctaagagtcatatttatgggcctgcagttgtaattgggccccattctgttcccccaagtggaaagatgaacagggtgtaagcaaccttccctgtagttagaaaaacgtttagttggatttatcagtctgatttttcactcataaacaattgcacaagcctttgcaagcccagagggtcttgtaataatgatggccgtggtccattatggcacagtgatgtgttctacggtggtcattttgctggcaatgacagtcacctctgaacttctctttccaacagacacaatttctcggggtttactttgtctcatcccaagagttccttgccaatgcctacgtcttagctgtgcttctgttccttgccctcctactgcaaaggacatttctgcaagcatcctactatgtggccattgaaactggaattaacttgagaggagcaatacaggtacttggatgattattttttcactttgccataagaaccattattaggaataatgtccatgagtgttattcatcctcatggacactcaagaataattctgctgtaaatttattttttgttgcccattaacgatgttttaaaacagtaaccattgacaaggcagtgtgggatagtggaaaatatcttgggctgaacttgggagacagtgtagctctggctctggttctgccttggactgggtctgaaaatccagctgctcagcccttggcttgaaagtggtagacgtcactaattgatcacagcactctttctgaccaagggtaaatgcaaccttggaatcctctctaagtggctgttccagagttctgctaccagacagtcttctttgggtgtgaaaaaaggaatgtgcttgacatacaaggtctagatagcctctaagacagggtcccctctaagatggggtattggtccatggcctgttaggaactgagccacacatcaggaggtaagcagtgggagcaagcattactacctgagctctgcctcctgtcagatcagcggctacattagactctcataggagtgcgaaccctattgtgaactgtgcaggcaagggtctaggttgtgtgttccttatgagaatctaatgcctgatgatctgaagtggaacagtttcatcctgaaaccatccctctcccccaggtccatggaaaaattgtcttccacgaaaccagtccctggtgccaaaaaggttgaggaccactgctctaagttctatttgaacccttaagtcttgctcactaatgagagtgacctatttggtctgttgggtcacttaagtctaggctcttggtcctgccttctgtgatttccttcttagagtttctggaaagatgatcaaagccagggagtgttcagggcccctctgaagaaggtgatgatgagagttgtccaagtcccagggtcttcactaggattttggttcagctatcagactagagagacatcctgattgagagtagtttaaatgggatagaagtttgtttattcttcagatagagtcagggctgacacaggagctactcaatgatcagagacctggcttcttctgtcatgttgctctgccagccttcttttgtgacttttgtctccatagccatggtgggtattgaaactgccactatatttacatttaaactagccagaagaagggacaagaggagggaacgcattttccttttaaaatggtaatacctgatttgcacataccctctcgcatcccattggtgagaaagtggccaaatggccgtatctagagagtctagaaagagcttggtctttattcttgacagctatatatgcactgctagaaattctctgtgcaaagaggagaatgggcattgggaataactagatgcagctatgcctagtgatgtccatgaagttgtggtaaaatcctgaagctaccttgttctttggaaatgttcctcagaatcattaacattagtcatgtgggagacaggagaagaagctctgcagaaaagggaccgagaggacaaggatatagcttgggctggggacaatgtcagagtccaaactctggctatcttggaatagtctgtgtgaacggtgccctcccaagttgtgcagtgcacaacctgtgcagctatatatggcaaccctgcccatccccagtggtttctcactgggaaagcagagtatttcctcagggatgtcattatgtgacaatagtggaaaaagcccaggaaaatctaagaccttctaagactcatgggggcccagagctgggaggaaccaagctgttgctcagttcagaaaacttctctagaaatcccagcctctcctcacacccctccagtgacaggcagacttgcaccaccacaagcaacagccacttttgtggttgggcagttttgtaattaaatatactaatgtgtgtatgtcataaattacattttccaattatgccaaaagagccaaaaatggttttttaatggttagcatataatcgtttttatcaaattgcttgaatctttcatgttaataagagagattcattactatgccacaaaaagcaaatactggcattaattatagaaacaaattaggggggtggagcgcaatggctcatgactgtaatcccagcgctttgggaggctgaggcgggtggatcacaaggtcagaagtttgagaccagcctgaccaacatagtgaaaccccatctctactaaaaatacaaaaattagccaggcatgttggcgtgcacctgtagtcccagctactcaggaggctgaggcaggagaatcgcttgaacccagcaggtggaggttgcagtgagctgagatcgtgccactatactccagcttgggcgacagagtgagacttcatctcaaaaaaaaaaaaaaaaaaaaagtggctcatgcctgtaatcccagcactttgggaggccaaggcgggtggatcacaaggtcaggagatcgagaccatcctggctaacatggtgaaaccccgtctctactaaaaatacaaaaaaaaattagccaggcatggtggcgggtgcctgtagtcccagctactcgggaggctgaggcaggagaatggcgtgaacccaggaggaggagcttgcagtgagccgagatggcaccaccgcactccagcctgggcgacacagcaagactctgaaaaaaaaaaaaaggaaagaaagaaggaaaggaaaggaaagaaaggaaaggaaaggaaggaaagaaagaaagaaaggaaagagagagagagaaagaaagaaagaaagaaagaaagaaagaaagaaagaaagaaagaaagaaagaaagaaagaaagagaaagaaagaaagaaaaagaaaagaaaggagttagggagaaaaaaaccctttctttctttcttttggagatttccggaaaatgtacccttacggatgagagcctgtgtcttcatgggttagagaataaccacgctttgtgcataaaaagttattaagcacaattcctgaattatacataattactagctgtcagtcagttgtgcatttctgtgtatgctggtcttcacttaataagactttatttcacagatcacttggtgtccctacttcactgaaactaggtgattatcttttgaagtctcatttcacataacctaggaggtatatagatttctttaaaaatgtcattgccattattttaaaccttacccatggtatatataaacttacagaaagacagaataggttcattattttaaaccttgcccatggtgtatattagctcacagaaagacatagaataggttcctgccttaagaaaacctgacccacaaaaaagcctgggtttacacaaaagaggaattaagggcggggagcccaccttacaacagaatgaataatagaattttatccaagagcaggcatcctgaggacatttaagacccggatgcatttttccttgttcaagagcacacatccaaaaattgcagtctttctgcgagtcatgatcactctgcacataaagcgtttaggttcagagctcggggaggccattaccatggctgctctctgtctgccctgtgagggtccttggggtggctgcactctggggatggtgctggggctgactgactcacgcggtcgtgtaacacatcagaccttccaaagtcgaacccttgttttgtttcaaggctcaattatgacaggacttggtctcagagcagatcccctccctaggctggagaaggccactttaaaacagatggcctgccccacttcatcatttttatggctctgatctgtgttctccactggcctctggtaaatcaagaatacaagtggacatgaagatctgctttaaaaaataaagaacagaccgggtgcggtggctcatgcctgtaatctcagcatttggaggccgaggtggatggatctcctgaggtcaggagtttgagaccagcctggccaacatggcaaaaccccatctctgctaaaaatataaaaattagctgggcatggtaggcacgtgcctataattccagctactccggaggctgaggcatgagaattgcttgaacccggaaggtggaggctgcagtgagctgagatcatgccacttcactccagcctgggaagcagagcgagactctgtctctaaataaataagtaaatgaattaaattaaataaaaataaagaaccaattaagtcctgtctacaggaaaaggccttacttgctggagaagtagcttgctgtgctggagtagactagtaagttggaacggtgatacagtaccaccttacagagctgctctagggcaccatggggactgtctgagaagcccctggcacactgtaacaggtggcatctggtgtggtgatgatgatgagaatgatgatgaatgtgaaacactctgctctcatttctagaccaagatttacaataaaattatgcacctgtccacctccaacctgtccatgggagaaatgactgctggacagatctgtaatctggttgccatcgacaccaatcagctcatgtggtttttcttcttgtgcccaaacctctgggctatgccagtacaggtactagatgggctgaggggaagggaggggggcagcaggacacacaaccagaatctgctggtccatggccagtaactaggagcacaccgtcttccactccatgcttgcctgtacctttcacacacttggctataccacaggctgtacctctgggtccctcctgtcccatactctgcaagcactgaccatctctcttaatgaccagagaaggcagtatcattaagactttaaaaatggagccaactttataaactatagaaaaatcaagccaggttcaggggctcacacctgtaatcccagcactttgggaggctgaggcaggaagattacatgagcacaggagttcaagactggcctgggcaacacagtgagaccccttctatgcagaaaaaaaaaagaagaaagaaaagaaaaatcgtacatggaatgcccacagatcttaaaagctatgttgtagcaaaatatttaattacatcaaaaagtgttagtgatgtatttttaagcaaaaagagtaagttacaaatagtatatgttgtatgcttactactaaactggaatatatgttatgtatacatttgtacagattcacacatgaaaaagaattggaaaatcacatagtgggattataagtgatttttattttctttatgtgtttctaaattctctaataagcgtgtataagatttggaaatcaacaacatgatacttttagcctaggcaacaaagtgagaccctgtctgtacaaaaaattagctggaagtggtggctcacaactatagccccagctactcagaggctgaggtgggaagattacctaaagtccaggaggcagaggttgcagtgagctacaatcacaccactgcactccagcctgggcgatagagtgacaccttgtctcaaaaacaaacaaaacctggtgttttttagccagatgtggtggtgcgcccctttagtcccagctacctgggagtctgagatggaaggattgcttgaccccaggagttcaaggctgcagtgagcaatgatcacgcccctgcacttcagcctggacaacagagagactcctgtctcttaaaaaataaaaataaaaacgttaaaacatggtatttttttaaagcaagacaacctttggtgctggctcaggaagaggtacattaccccccaataatcagaggagaatcgtcagcatgattgatctgacctcgggcttcatgtgtcccatctcccacccggagctcttccaccacagagtctgatcctgtcctatgcctgggactaaatcttcaccctggtgttcaggccagaaaccgaaatcccagacccattcccagagggcgggaaggttccaccgggagagcttgatgtagcagaaagtgacttgggtgagacaggctgattcaaatacttaacctctctgagccttggtttctttatctatgaaatggggaggctgcccaccctctggagttgctatggcaattcagttagataatgtaagtaacacagcaggcagagtggcccccagagtcttcacttcgtaaatatcagatccctctaccttgcacatgtttggtatgagtgaggtgttaccaatccagaatccattgcttcttgggataaagattccataaaccttcatctccagtgatttgtattggtcctccttacttgtaaagcttagagtttaaaaatattaaaagaaaaaaaggggagaggctcccacagggacacagctagacaagatgagatgcagggaatctgatgttcttttttatgggaacagtcatatatgccatcccccattaccacctacccatgcccagactgcccccgctccattctgccaagacagatcaatgactataaaagctacaaaagggcctggagatctcatctagtttagttaccaaccaaccttttatgcacaagactttctaagctgggtgtggtggctcatgcctgtagtctcagccactcaaaaggctgaggtaggaggatggcttgagcccaagagttcgagtccagcctgggcaacatagagagacctcatctctaacacaattttttttttgaaacatgaaaaatgaagatttctgaccatgcttctctcattagttaacactttgggctgtgagggtctgatgcagagagacacagcctgggaggatcctaacatgtacacagcattcaaaaggctacaagacactttctgttgtgtccccttgaacaagcagtttgtaagattttgttggccaggcatggtggctcgctcctgtaatcccagcactttgggaggctgaggctgatggttcacctgaggtcaggagttcgagaccagcctgaccaatatggtgaaaccccgtctctactaaaaatacaaaaattagccgggcatgatggcgtgtgcctgtagtctcagctactccggaggctgagacaggagaattgcttgagcccaggaggcggagactgtggtgagctgagatcgtgtcactgcgttccagcctgggtaacagagcgagactcggtctaaaaaaaaaaaaaaaaaagaaatcaggttttgtctactaaacctgctgcacggttaccgttactagtactcacagggtttgttgcacatgcatcgttgctaatagtgctaactaatattaacagcccttgccctatgcctggccctgtcccagcccccctcccttgtataatttaacccttgcactgggggtagagattttcatatctactgatttcttacctttgctcatttatcatggagtgtcctttggttttctgtgtttgtatatacctttaccacttatagatttgaccagcactcaagaaccagtgttactcctgggagttaatacaatcccagccccatggcaaagaaactcatgtggttaggattctgtgtgcagcctggttagccacagggcacgtaaggctttttataatattgacatgagtgcagaagccccattcccgtgtaagccctgagggctcttgtttcataatctttttttggtcacatgcacacagctttattgagatataacccactcatttaaagcatacaaatcagtgggttttagtgtcctatattcacagagctgtgcagccatcatcacaaatgtggaagttttcatttccccaaaaagaaacccgtacccattggcagtcactcctcatcttcgcccccagcccttggccaccgtttatctacacatacttttgaaaggctagtgaaactttctcagaaaaataaatgcttgctcaaacatttgggctataatttcaggggcttcatgggtgcccccctgacatttatcaagaacaccaggttaaggaatttagctataatggaggcctctgtgtttcccagtctcctgggtatcagaggcccagagagggcaggtgccttaccctgggccacgcagtgaaccagtggcagcaccatactcacacatctcctttctgcggttccccagtgacagagttctcaggaagctttttcatttattttctgagaggagggtaggccatcttgtattgatctccaactatatgccagccacaattctaggtgcttatcataaaggttcatttaatcttcacaatagtcctgcagagtggacagagtccttcagagtgggcattataatcaccattttaaagatggagaagctgaaaaccagagaggttaagtaactcacccaagactgcacagcaaaaggctggggctttgaaactcagggccacagactccaaagactatgtcctccccactatgctagatttttttcctaacctgtgaataggagacaaaatagtccttttatttctcacagttgctttgcacactcagaatccatgatttcttctgcatgagggccattcagacctgtgcagaagagagtaatggaccaaggagtcttgggagcacctaggaggaggggatgggggagcatgaggaggagccagggaacagcagcagctgcagcaccagctcccaccccagcctctgccagtctcttggaggtggtgtgggtgcagacaccggctcacaaggtgccctgttagtgagcttggggtgccatgggagccttcttgttgtcaggcccaacccaagctggctgaagaacaccctgatggcctccatttgagcacaactaatgaaggactggatgccagagataagtccaggagggtgatgctgcagggcaggccagggaagagggtacttcatctctatcatggtcctctgcccatccatgccagcatctaacacctgttaaacactgggaggcaggtggtgaaggggccacttcccagcctctaagatacctcctaagccaggaggcattctgtgattaaattacagggcctcccacttactcctttatccttgaggcggtgctggaagcttaatgccaatctggtgtagggctctgggactacaggaccaaggcaagcagtcctttctctctctctctctctttttagctaaggaagccagcacatctgttctttgagaaaaagccctgtatttagaggtgtctgcctttgaaggcaacctgagaaactgtcatcttggcgctttggggactggccatttacacttctcataaatattcagaagtaggcagtcatttacataaagctaaatgcagaaggaattctcttttcagggaatacctggcagattcattaaaaaaattaaagaaaccaagagcataagaatgaaaagcgaattctcggaccccaggctggttttttctggcatgggtgcagtaactttgcctctttgctcagttatcacttttttccaatgacagtaaccataagccctgagagccagcaaatagaacaaaaggtgctgtcacaaacattgtgcaatctcatctctgagatttccatctggaaaatagactggagagagttaaggcttcaaccagccttgcagataaatgcagttagttaccagcccagcaaccctctgcttgcatgagagcccattatgctaacctccttttgaaattgctttgtttctcctccttccctgcactccactccccaagataatttggaaacctgggcaccaaggcttgtcccactctaggggactggggaaacagggattttgccagcacctcctggcagggcaaccatcaggtcaaagggacctgacccatgaccccttcctcagatcattgtgggtgtgattctcctctactacatactcggagtcagtgccttaattggagcagctgtcatcattctactggctcctgtccagtacttcgtggccaccaagctgtctcaggcccagcggagcacactggtgagtgcccaaaggtgtgtgtgttttgtccctcttcccctccttccctcgacagcagcaggtctcctcccacacacccacactgtcattgactttgactttgactttgagtaggccacttcacctgtccaggcctcagcttctttgtctgggaaatggagtcaatgggggaggaggctgcctcccggtgaggacaggaggcgggcatggcagtgacagtattgacactcaggccttcctctcgggtgggagacggagcagaagcctctcccctctgactcggggacccctgcaggagtattccaatgagcggctgaagcagaccaacgagatgctccgcggcatcaagctgctgaagctgtacgcctgggagaacatcttccgcacgcgggtggagacgacccgcaggaaggagatgaccagcctcagggcctttgccatctatacctccatctccagtgagttcaccccacacagccagccctgggtgctgctgcgtacatgcaaggagagggtgtcagagctcgggtaagagggggtgcagggacagaagcaggaggccttgagattatccgactcagtaggggagcctcaaactggctctgatagctaagctcccagaaatcaaagtactcttcattcatttatccaacaaacatgcatggaaagcctgctatgtgctggacactgtgctggccctcaggatacagtgatgaggaagagagatgaagtttcattcctcatggaactgatatgttattgacagacagcagcaagtaagtaaatgaccacagttttgaactctcctaagaatgaagactttttagtaagtcagactgagctgtcattgccctggggaagctacaagaaagcttccatccacttggggctatgcaaaagaaaaagactagttatccttaaatatcagaagcccaggctgaaggtactcacaggtgtagggactgaatttatattaaccaagtagtttgggaaccccaagccaaggaagaagaaaaagaccaaaactggtaaaagtcctagagtcccatatacttgaaaccattttactgagaatgtaaaacttttttttctttttttgagatggagtctcgctctgtcacccaggctggagtgcagtggcaaaatctcggctcactgcaacctccacatcccaggttcaagtgattctcctgcctcagcctcccatgtagctgggactacaggcacacaccaccacacccgactaatttttgtatttttagtagagacagagtttcaccatattggccaggctagtcttgaactcctgacctcgtgatccacccgcctcagcctcccaaagtgctggaattacatgcatgagccactgtgcccagcccaaaagattttttagaaattgaaattttagttatggaaattaattcagtgaacaatggtcccctggtcagagtgagggcttacggaggtcaggtgatccatggagtcctggcccaagtttatctcacagttggtctcgtggctccgtggacccatcccatggtggttacttcccaagtgcataattgggatgtagatatttagcaaccagctgacttcacactagttccctgacctgtccagtctaagagtcattatggccaagtggaagcccctggaaagaagaaaacaaaaaagaaaccaaaacttactcagtgcacaggttacatgaatgagtatagctgaagagagaatttttgaattagaagacagatgagtggggattacacagaacgtggcaaggagagtaagttggtagaaccattttacagatgggaaattaaggccagaggggagtgtgttcctgagatccctcctgaggttagtagcatggctcggactagatcctccaaagtctcttaactcctggtctcaggctattttccacaaagagctgggggcctctgtggggtgaagaagacttaggacaccatggggcaccattatgaggccatttcctcctaggagaaaaaaaatctctgggctctgaaaggagtagaattagggtaggaaattaagagaggctaccgaccacctcctccaactaaaattggttcttttggtgccaggaagagacacacctggtgggggagggaaggtggtaatggagggggtgctggtagtgtctcccagatagacccatccaacaagtctcatggagaatgagacggtcactcaggtcatctgcgtattcttggcattcttgctgcctagagagagagtctgatggagctaggtggccaccaagctgtcccactccccaagacagtttggaaacatgggcaccaaggcatgtccctgtctaggggactggggaaatatcccatagcagtgttctcacagtatggggctggccatgaataccccaggagtccaacctccctttgtccagctagaccatggtgtcctatgcctcaggcagggaatgtggtccagtcatcagtggctgggccgtctgccatacatggtgcaagccatggcgttttatgcagaaagtcctgctagcatttgattttctcagaatggagctgtgagcatggcaggcaaccactgtttcctggattcttcaccaagacaccccaagttcctggtctctccccgttatcctcatccctgaccctgtggttctcagagcctccaaacacactcaggctaagcactccatagacaggggaaatttggaaggaacatctagggagctcagaaaagccaatgtccctagccccaggcccacttcaaccttctctctgtcagtcctgcctgcccctggaggctggttacatgaagagtaaccccctgcttgtgtatagccccccagttttgtacaggtttagagacagttcccagcagtaggaacagctgccgaggtgggagagggcttctcccgatagccgggggacttcctctcccaggaacaacagggtggggtagagcaggcttgtcgttgctgagatagagagagggaagggaaacaacaaggaaagtgggggcactgggtccccaaggttcctggcacagcaagcagtgaagttggggcagcctcaggtcatgtagtgggggcaggtgacatctgctttgactgctcctaagagatatgtactcatctcctggattccaaactgcagcctgggacatgttttcttatataaacagcatcaaaagatgtgtgagttcccaggctagcccactgaaccctacctagtgggtgctcattgtcccccagagcccccagaagacaagccgtggctttgtgatgggcctggggccaggaggacctagggatatgttgtgaagagctgagaagactctggaaaaaaggggctctggagccaagcaggagcccgcccaggactcctcacgtgtccaagtcacctagggagagaaacagagcagcccaggttggtccctggaagagagcagcggaggaggggaaaggggagagcccctggggagagctttgaaagtcaagtgctgtttgctcagtgtgtttgcctttccgaggatgtgtttttttttccctccgttagtcagcagtgggagggggagagagacgggtggtagggtgcagggtacctcctggctgcaggcatatgctttgagtgcgtgttcatttacctcctctggacttcctgccttctgttaccagggatcaagacacaggtcattaggcgtgaggtaatggggcatctcttgttctgacccctggcgccagtcttggagtcctgacgctgcagaggagccccagagtcacatttcctgttggggcccatcctgctcatatgcggcaccatcagacttctgggcaggcaagattacctgtgactctgtctgatggtctcgccatcaatatcactgagagtagctgtgtatggagtcccgaactggtacaggataaaacagggggctgaaaagggaatgaatgggcacagtttctctggcatcaaaagtcacatccagaattgatatttcctgttgagtaaaaatagaaatataagttgctcagtggatgttgagtgagccctattcatgtgccccactctgtgccaagcaccaggaaggagggaagggaaaaatgataagatgttctccccgttctccaggagtttatgctccactaagaagtcagagctaacatgcacagaacagtgtggcagcgagagcagaaccgtgtggccagctccatgcttgccgcctagcaagcgtgattgcacttcatcctcataacaacttggtgaggtgtgttgctctgttgtcccattttacagcagagaggactgactctcagtgaattgaaatgtctcagtgaggtcttccacagcaaaaggcgaagcacagagaaggaagtccatgtgggctgggagttcacccagagattcatgtaggggcaatgtgggctgtaccttgcaagatggtgggatttcaatgaggagaagacaaagtgggaggaagctggagacaaggactgtggtctcttcctttagaagtcagttcaatctttttttccttgtggaagcagcataactctaggtggttcctctgtatctgaggacaagctttgtagaggtgacaaaggggtcctaggtcctatcaggcaagcactcgatatgctgccagttcattctgtccattgtgagatacccattccagagcgcttcctctgtgccaggctctacggaggttctggatgttaaagaggaagcaggcatggccctggccctcccagtcttgtgggagattgatcatgcccatgaatagtgaccatgtggtcagagccacagggtcaattccaaatgcccctgtttctcttttgtgttactcacctgactctgggtctttcgtttcttccattcattttttttaaacaaatatttcctgcccaccttctgtgtgccaggcctggggatgcagtgggagaagcctctgtcctcctcagtggaggcgctaactcagaacaggcagtggagaaaaacaacatgacctggagacctggtgccccttccttccccagcatctttgaaattcttttggttgttgttgttttgagatggagtctcactctgttgtcaggctggagtgcagtggcgcgatctcaactcactgcaacctctgcctcccaggttcaagtaattctccctgcctcagcctcccaagtagctgggattacaggtgctctctaccatgcccagtaatattttttgtatttttagtagagacagggtttcgccatgttggccagcctggtctcaaactcctgacctcaggtgatccacctgccttggcctcccaaaatgctgggattacaagcatgagccactgtgcctggcctgaaattcttcaatatctacctgcccttctgccagttggtgcagccacagtgggctgcttatgcatatcctggcctggcttggtggggagcatggctgagggagagccggggcacccatcaattaaggaggtaaagatcagtctgactgagatgcctcctgccacacttcctcagctgccagcaactgacaccattaacctgatttccttccccctctgttgactgcactgactattggactgaatgggaaacagccccgtgcacctcaaaatgcacttcccctcctgcagatgcatcttgcaattaggcccaaactgtgagcctgcatgctcctcccctggccctgcacaggcaacaaagctgaagttaatcagaggtacaaatggctggctatgcctctctgacacgtaacttctggaacatgtatcaatgctttggaaatgaaaagctcctggtattgcaatgccaggctggtgcccataagggccagaaaacattccttgggcaaagccagggggagtgggtgatctgatcccagctcaggtttgttgatttgttgttttgtttgtttcgttttgtatggggcaagggttgagggtatgaaaaacttacactatcatttactaccgtagtccccagaacccagcacaccagcacaaggcctggaacagggataccttttttgaatgaataagtctttttttttttttttttttttttttttgagacagagtttcactcttgttgcccaggctggagtgcagtggcgcgatctcggctcactgcaacctccgcctcctgggttcaagcgattctcctgcctcagcctctcgagtagctaggattacaggtatgcgccaccacgcctggctaatattttggtatttttagtagagatggggtttcaccatgttggccaggctggtctcaaactcctgacctcaggtgatccacccaccttggcctcccagagtgctgggattacaggcgtgagccactgtgcccagccttgaatggataagtcttaagggatatttttggaaaggatattctaaaaaatacccatgtctctacactattgcagaagggctttcagttttgatggcagcctttcaggccagcctacacgcaactaaacttttccataacagcatcacacttacacaagaagaaggttttataatccacttgccattatttaacatagttcttcctccttaactttcaagatctgagcactataatgttcttctttttgtttttgtttttttctaaatcaaattaaggtgagtcacctcaccttgggcctgagttggacagaaatctattcttggctatattccccacccctccaccaccttggaaccttatagaactttatgtggttcaggaaaatgagggcgaggcctcagatcttcaacccatgacagctgtatgcccagctccctgccttcctgtcttacccccagctagggcacaggactgactattgtgcccagagaggtgccagagcctgtaacaaccccagacttcccaggtccagccacatccaccccagagccccaaaagatgatcttcagagagacctttaaaacacaagtagctggtcacttccatccagaccagaacccaagatggctgtgctcttgctgagacatgttggttgtcattgcctccgagcccactttagccctcagctctgtaccagaaatgctgttcctttgggaatcacagccaaagaagagatggagcagttctggaataagaacacaagttcaaactgtcccatatctccccacatcactatctacagttggtctcttcccatggcgatgtccatctgccaccgtggcactggtattgctttgagtgcaggggtctctctttttggcatgttggccctgttactccctgggaactttgagtcttatttggaatgcgtgaagtccctgtgtccggggccagcactgatccacacagctaagtttgcactcatcttccctctcatgtatcatatctggaatggggtctgacacttgatgtgggacctaggaaaaggcctgaagattccccagctataccaatctggagtggttgtcccggttcttactgtactgtcctctgtagggctggcagccatgtgaagaacagaggttcccagcatcatcttcctacacattattacattcacccatctttctgtttctcacttttatctccagcctgggaaaagttctccttatttgtttaaatccttttgtgcttttagatccccttggagcagtagagtaccttgtagaccataagagtggaaaagggtctagttttctccttgtttctaaagatggggtggctgaaaaaactccccttttttgcctacagcttgcctctctgggcctagaagtggttattctgtctccatattggcctttgatttgtgctgagggtcagcttttggctccttcttcctgagacagtggaaacaatgccagctgtgtggcttctgccctgggggctgggggtgaggctttgggtgccactgcctgtgggttgctggcttaaaggacaattctgttcattggtgagagcccaggccattaacacctacgcagtgttattgaaagaagagaggcgggggtggaggggaattagtctatcccagctagagggagataaagagggctagttagttcttggagcagctgctttgaggagaaaatgtatagcttttgacacaacaggaagatccagaaaattatcattgaacatattaaaggttatttctttttcttgcaaaacacacacacacacacacacacacacacacacacgcgaacacacgcagctgatgattctactctcccagccccagccctgaaggggacccagaactccctgcacaaaggctgtccttcaaggggagggtgaaagaagtggaaaatcacattttcattctttagcgtctccatacaacagccagaactgggcagaagctaattatatcagaagcatactccatgttgctgcatcagctttgggatgttcatttttaaatttatttatagcttgtctcattcctcaaaggagttcagggagctacaaaaataaagacaataaaattgaaaaaaattaaattaaaaaaaccatgaccagggaaaatgtgcagtagaatgaagtgtcaattatcacgttttctgactgcaaaatctcccccacggctgatgcaccatcatttactacaacagcccctcttgttggacatttccagtttatttcgtttgggatggtttgttgctgttgctgtggttgtggttttgttttattgaattttgtgttagctgcagctaataccatcttgctgatggctttgcgctgctcttgaatgattactcaggataaatttcctggagacggattataggatcagaaggtctgaacttctgtgtggctctagctacaaagcaccagattgctttccaagagcgttgtagcaatttataatccaacactcagcctattttttggctgggagtcaagccccagaatgtgaaggaggggtcttggcctggagcaggggctgagggatgggtgcacaggacccctccttattggttatttatggggatgggccaggaggagcagaatagaggcccctgccctcccagttgctccttggagtgactgaccccataggggaggggcgaggctacctcacatttagaactatgtagttggtgatggtcaaggtcctaggtctgatgggcatcctcctccctctcctcctcagccagtaatggctgcactatgtcgtatgtcctagatctgggtcccttttgctgtgggaacaccaataatacttacgctgtttcctgccggaaacggtgcaggagggctgtggcatggtagtgggccctggaaaccatctagccttcatgaggaagggcagttaaagcacaggcatgtatgatgttggtattgattaaaagcctcacgggcagagaaattcgccatctgccagggccccagccatacgagggctccagccatacatcctccaggagactgggacctctccaattgcaggagccttgccttccccatcagattaggaattccccgaggatggggacaatgtccttcccacctgcttgagaactcctaaggggcatgtactctgtctccccattgtatctggaacttcctgggagcatagctcctgtctccgtcctcagactgggaatcccctaagggcagaggccatgtccttccacccacttgggattccctgaagttggggaccacatctctgatgtacaatgctttgtatgtactgactgctgcaggattcttggagtaaatgggcagtcaacttcttggactggtattgaccatctggacttcatcagagtgtccaagactttgccattcattagacaggggccatgtgcacaggcagagccctggcctctggcttctggctcctgactcctggtccctctgctttaatttggctaatggcagaaccagactcctttctgggctgccctggaaggggatccttgaatgaaagaggatagatgggaaggtggcagctgacatggttacctcttatgccatgggggggctgctctctctggaaatttaggcctggggtcagggcactgttgagcattttacaccctaggccagaggaggggtgacctgtggagcagggctaagctagtagcccatgaggtatgatgtgtaggcagcacctggggctcacagagcctgttacccatgttatctcctctgaccttggaaagagctggggtgtatgaacaagtatttataagtttacaaaaatcatatgaggaaactgaggcacggggaaggtaaatgacatgccctaggttacacagcttataagtagcagggattctgcccttctgtcacaccaagtcccactgtcttttcttcctggagtccctgtgactgatctaaaggccacatgtttaacagaataaggaggaggcctctgttgcagcaaaccagctaccccacccgcacacagactctaagggacatcctgctttaagctgtccttagttactaatacctcagtgagaatgagtttgaaattttctcaagagccatgggagactaggaagtctctaagcttcatagagagcctggcttggggggacacaggagccaaaggcagaggaagaagtggcagctttgtgcccccagaaacacgtgctcctgacctcacagttggccacagccagccaactctcccatccttctcccaccactttcccgtggggctaacttcaccctgtccacacggagtgacttaacagtttaagccccagagtcgggggccggggtacctgggacaagagtcctgagggaaatggggtgaggaactggaagtgccacagggctagagttctgcccctagcctactggagctgtgccccacaggctggccccactggactgcgctgcctccaagccatcctgggcatctccatgtgtagctgtcacgctcctcccactaaacgcctccctgtgcttcctctgcagttttcatgaacacggccatccccattgcagctgtcctcatagtaagtggatcctttctccatctcttgggggtagggtggagggggagggcgtctgcagtgacaggctgcccagatttggcctttctgcacaggggcctcagaagacaggctccacagccagactgaaaataggatcgaaagtttatagagggtgtggcccctccccaactccagccgaacaggggcctctgcctccaggcctggaagaccggaggcttagtatttagagaaattaaactttcttttaaaaaatagctatccaaatttttaatttttaaagtgaaacatgtgtattgtagaagtgatgggaaatccagaacagaaagctcaaagagaattaaaatcacccataatcccactggtaacatttttaatgtgtttctttccagtctttttttaaggcctatgatatgtcattttctacaaaaataggaatgtgctatgcatgcagttttgcaacctgctcttttaaatttaggaatatgccacacacaattctccatgccactgaatattatgatggtggctttctaaagcaattttgataaaagctgtgtgtgagctgagccatgggggtcaagcagcatgctcctacagaaaggcctgggcccctacgagcctgcagccccctcacccagcctcccatccccatcttctgtgatggctgcagttccttaaaaagatctgcttatttcccccggggccagtgtccctgagctgtgtagagttcacagcctgtcggatacacttgggaattcacttccaatgtgatgtattgagctggttcctggcctggctcctgggggaactgtgggtaacagaggccactgagccagccaggtggctggggcaaagcactgtgcagtttcgtaatcactctgtttacgttatcccgatgaggactggggagatgagcaccccgcctgctgtctgcagagggggccgtgctgacctaacccgagatctcctccctgcttattcccagccaagactgggcaggacagggagtcttggccaggacagggagggagcagcccctgctctccagcttgaagtcctgaacttgttggggacgtttccatgagatgactgtggggatgatgaaggtgtctccaactaaaagatcctcttaggagcctgctccctgacagccctctcatttcccttccagtgctgagcgtttccagtgtgggagggacccacaccctgggccaccctggcctcacttgtgcctctgtccacagactttcgtgggccacgtcagcttcttcaaagaggccgacttctcgccctccgtggcctttgcctccctctccctcttccatatcttggtcacaccgctgttcctgctgtccagtgtggtccgatctaccgtcaaagctctagtgaggtgaggggagggtccgggcgagggcactgggcaggcaggtcctgtgtcagcctcaaggcttgctcgagtgatggccaaaccacagctgtttggtcccggaacacacccccattgctgggccttgctgtagctggtcctggttggtcagagggacattggcctgtatggtttcccagctcgccatccctgagcaaggacttgcttacatacctcccaggagaggggactcactgtcactttcacgacaacttaaaaaaaaaaaaaaaccagtgttgagccaaatgtggaatcctcctaaattctacccactggtcctaacttcaccctccagagccaccaagaatgaggccatcccgtccccacgtggctgccccatggatatcagaaggcatccactgtgtctatctttcccaggccaagtatcccctaccctttccacagcccctgagccctcacagcctcagccagtgaaacagcttcccccaagcgctgggtcctgctctgattggcccacagctcttggaggctcccacttccaggctctagagcctcatggggactctgccactgtcccagaggcattgccctcttgggaatgaaagcctgaaggtagaaggctgaggctttggctgggaaatgccctgtctggagtgagaagatgtccttgggcctctgaagtagctctgcctccttgaaagcaagagcctgtcatgcctctatggagggctggcttgtccttacccatggccagagaaccagtcagtaacaaatgtcctctgtgtcttcagccttgaggaaggtgacacccctgtctcatgggaccctggcaggtactgggaagctggaaggaaggagtagctgttggaatgaagtagctgatagagagggtagcttgcagggggagactctagcatgggttcaaagatggaatggggcataactcagcaaaattatgctctaaggagtatctgaccaggcagtagctggttaaacagggattagctcccatttccacagtcggctgtgctgactcagtttcttgaccagggtgttgtggggtctgaagatcacccctcctcccaccacccactctccagccctatgattctgtgtagaaaccacagatttaagaacgctgcacctgcctgaaaactgttgcactgatcccaaagcgttcatattttcaaacactctggatcccactgtttccaggaatggaacaccagagtagcagaggccttttcagtgaggcagctcaggctctggctgaaggtgggcgcaggacactacctgaagcttcaccccaagagatgagggccagctccactcttcccagtcaccgcctgtgggggagggaggctggacagggcatgaaggcagagcctggtggtctgcccctcccatctaggggtggcgcacagaaagggagactccaggccacagctcacttacaccccagaataaccttgccttgagggtgggatggcttgtctgccccaggcctgttggacatttagcaaaagagaagaaaggggaatacaaacaatcctgagcttcccagaaagctttcacacctccaggatgggagagaatgaactagaagagtgaagcttccagtgcttcctcaggtccacagggaaatctggacaggggagagggtaggaatagccgcctcccccgtgagtaatgacacctcctccagcaggctgttatggggatccgattacataatgctacaaaacagttaacacagtgtctggcatttagtgtatgctcacaaaatactagctattgattctttaccaatcctagtcctaactaaccttaaccctgaccaatccaacaccaaccatccttcagtctaataacccagactaactaacttcaacattaaccctaaaactaaccaatctcacctccaatccagaccccagcctattccagctgactggtcaaccctagcaaaccctggtaacaccaattacctgcccccatgcccactggtctgcccccttcagtgtgggctttgtgggactatacttcaggcctgagatcctgctcagagctctctatcaggctgcgccctctcccctcccctctgcccctggcaggggtgaggggtgtctctgtgcttcccgagcagcgtgcaaaagctaagcgagttcctgtccagtgcagagatccgtgaggagcagtgtgccccccatgagcccacacctcagggcccagccagcaagtaccaggcggtggtgagtgcccggcctccccttgctactcccagcatggtcctctaaggcccaaaacttgggcctgctgtgtcggacttctgccttttttcccaggaagaggggctcccttccctacacagctcccagcccagtgggtcctcacctccaaaccacccccagcccctcagggttgtgaaccgcaagcgtccagcccgggaggattgtcggggcctcaccggcccactgcagagcctggtccccagtgcagatggcgatgctgacaactgctgtgtccaggtgagtcctgctgccccatgcctggccacccagcaccaactcccagagggagctcagcacctggaaagccagaaagctgcatgcttagtcctctgcagaggtcaccctgcctgcctgtacggtccataggagtccagaaaccagggaccaccaagtggggggacccccagccttaggcaagggtcagcatgagaaggccagtctcccactcccctgctctggaagtgatccaggggctggaatcagtgtcttttggctttcatggaggaggggaagccagagactattcactgggaactggctgcctttctgttctctcctgggcggtgggacacgcctaatgaagatcatgggaggctacttcacgtggaccccagatggaatccccacactgtccaacatcaccattcgtatcccccgaggtatggcccagtccacccctccagcatgcccctccccatgtcccactgaataacatagagataaaaagacaaagctgcatttattgagcacctactctctgctcattcttggtgtatgccctgggtatattatagaaggggaaggctacattctagaggcttccgtgtgctgggtgggagtgaagcactaaggacagggtaaaattgccagccttaatgtcaaaccatccattgcagacagtataggtaatgcacaaaaagatcagaagtgggtagccaaggaacgcaagtggaagtgatggggtttctgagaatggacaaaggccctgaggccatgaggcaggaggattttctggcagaggcagccatgagcaaagtatggaggtgggttggaggtgggacccaggatggtgtttcttgggaccacaaggagcctgggctcatactaggagcatgggaaaggagaagcgagtgcttaggaagggtggcggggcaggaaatcagagagggggaaggacctggggagccagaggaggatgttgatttccagaaggaaaggattaaagagggagaggacttgctggggattctaggtaggaagaaagaaaacaggggccccagggttgggtgcatctgtctgtctgtctttctgggtaatggttgttcagactcccccggccccactcacatctgccaccctccctccctgcaggccagctgactatgatcgtggggcaggtgggctgcggcaagtcctcgctccttctagccgcactgggggagatgcagaaggtctcaggggctgtcttctggagcaggtaatacatgtatcctcagggcccagtggaggggaaatctccttttaaccatcctcctcagttgaggatgcacacacatttattggagggcccactctgtgttcagtgaggactcaataaatgctgctaatggatattctcatcatcatcactagtacgtattcacctcttactatgcgcaggttctttgctaagtcctttgcatgcattatttcatttaatttttatgataactaacaaggtccatactgttctcaattctcatttatagaggaaggttaaactatttgtcctaattcacacagctaataagtggcagagctggaattgaaactcagttctgtcagactctgaatcccatggttactcagatgcacggcagtaatttcccagtgtgggaaattgcaacaccaacattggtttccagcttggtcctgagctgcactgacctacacaccataagtgggtgttctgaagatccagatgtaaccaataaatgttggtttctgggcaaagatcactgtcttaattaaagagccagaaccccaggctcagtcaatcacgaatctgttatttatacccacctacttccaagaagcacttgaaactagttgatgaaagattcatgtaaaaatcaaaaccacaatgagataccatctcacacccgttagaatggtgatcgttaaaaagtcaggaaacaacaaatgctggagaggatgtggagaaataggaacgcttttacactgttggtgggagtgtaaattagttcaaccattgtggaagacagtgcggtgattcctcaaggatctagaaccagaaataccatttgacccagcaattccattactgggtatatacccaaaggattataaatcattctactataaagacacatgcagacgtatgtttattgcagcactattcacaatagcaaagacttggaaacaacccaaatgcccatcaatgatagactggataaagaaaatgtggcacatatacaccatggaatactatgcagacataaaaaaggttgagttcgtgtcctttgcagggacatggatgaagctggaaactatcattctcagcaaactcacacaggaacagaaaagcaaataccacatgttctcactcataagtgggagttgaacaatgagaacacatggacacagggaggggaacatcacacactggggcctgtctgggggtggggggcaaggggagggatagcattaggagaaatacttaatgtagatgaagggttgatgggtgcagcaaaccaccatggcatgtgtatacctatgtaacaaacctgcacgttctgcacgtatatcccagaacttgaagtataataaaaaaagatgcatgtaaaataaaaccctttaaaaaggtaagaaaataggaactgagaaatgaagagggtaaaaagatgttcagcaacctgggcagaggacaactacagccatcaacataaaacctggctctgtgccctctggtagccaagggaaaaagggatctctgggctttggagtattcatttaggaataaaagttgcagccaatcagcagaagggcaagctttccctaccaatcatttctaggggaaaattattgaaggtgtcaggtttttcataagcatgagtacagaactgagcagggagaaagactttgggcccaatgtctgaatatcaacatgcacccccgtttcctgcatttccaagatgtccctgaatggtgtatccaaaagatggcaaatttccctcctcagtggggtcgtgggctagcagatgagccccttgggtttcccatcacctcccatcagggactgtgatgtctttgggggcagaggggtctttgcctccattcgccattttatttgggagatttttcaacatagcctgactgggaaggcccaggtattcggtttgagatcatattgccttattccgactgcctctccagcctttggagggaggagcccttttctgctgtccaactgcatgcctgcagcaagaagacaagagtccccagtgcactgtgagctgaagaaagtaaccaatatttattgggtacctcctatgggccatgccctttgctaagtgcattgtcaacatgatctcatcaagcctcctactaagtttaggaggggagtgttgttaccccatttcacagaagcagaaactcaggctcagagaagttgggtgacttactagtcagtgtgtggagcagagactctgcccatgttctttccctcaaacctggtcactgctggggcccccagggcctagtcctaagggttattgtccaagccccatgtagtggtcaggctggatctgggctctcctccaaggcagggcttttccagaaggattgcagggctcagacactggagctgcccctgccttgacctgctcagcatggatgtcaaaacccactctgaacctggtccctttgccctgctttcttctcctcccccaccctcatgccctcatgtggcatcgtgcctgcctcaggagctctccttgtcctatgtagatgaagcaggcatgattggcaggggtctgctctgccctgcctcagtccccacctcttctccaagctgtgccaaccctccgggtctgactgctgcccctctctcttaggaaacctctgccccagcccagggaacacaaggagcctctccaaggcagaggaccctaagcacttcttttttttattattttttattttattttaggttctgagatacatgtgcagagtgtgcaggtttgttacatagctatacatgtgccatggtgctttgctgcacctatcaacctgtcatctttttaagccccacatgtattaggtatttgtcctaatgctctccctcctcttgcctcccaccccccgacaggctcggtatgtgatgttcccctccctgtgtccacgtgttctcattgttcaactcccacttatagtgagcacatgtggtggttggttttctgttcctgcctaagcacttattataggccaggcactgtgcaggcacctcatcatctcagtcagtctgcaccgaactctgtgcagtagatattattatatcctcatttatcagattaggaaactgaggtgaagcaagttgtccaaggccacccagctgttaaatggcagaagtgggatttgcacctaggtgctcaagtgcattggtttgccaccatgtgctcaaagagaaggggcacaagagcctcatgaagaaggcatagctagcctgacagtccaaaggccagcagccgctgtggccatgactcacacacacctgcctcctcccagaactgccacgtgggtcctcacagctctgtccttatcaacacttactctcctttacaggtagcctaggccccagctcccagctctgttcgaggctcgcagaggggcggtagtgaaggggtctcatttctccaggatcctctttgctctctcgcccggtcctggtccagcttccctttcaagcatagtgaagtgcatttgttagcttgcagccaaccctgggaaatcatgagaatttgttcccaagtcaactcattctccagcgtccacagtgacgtattcactcacccagttgagcgcctagtgtatactagaccctgtgacagcaacaggagtgcaaaggtgactaagacgtggcccctgctttttttttttttttttttttttgagacggagtctcgccctgttgcccaggctggagtgcagtggtgcgatctcagctcctcacaagctctgcctcctaggttcaagcgattctcctgcttcagcctcccaagtagctgggactacaggtgtacaccaccatgccggctaattttttgtatttttagtagagacggggtttcactatgttggccagggtaatctcgaactcctgacctcatgatccgcccgcctcagcctcccaaagtgctgggattacaggcatgagccaccacccctggccggccccgcttttaagagaggggagagaagacctgggccttagaagagctcagaggaaccacaattgactctgcagtcaaggagaggaggctcactgcggatgtggtatttgagccttgaaggatgagtgtggtttcatcaagtagaaaaggcagggatgggaaagggaggtggtccaggcaggggtgatggtgtgggcaaagccttgctgatattaaagaacatagttctgtgcacctggaacactggatgcatggggtgcattatgaaagatgggactgaagaagtgaacttggcttagatcccatgtagtaggtctgagaagtaagatttaacccaaaggttgcaaaagaaccatgcttgtgataaaggatgatggattggggaaacagagaaaaagacagacagactgtaggaagggaggtattagcaaataatcataacacagtgtgaggtgtgcattaatattcactcattccaagtattgatcaagaagagaggtaggtactgggttaggaaacagcttgggcaaatgcatggggaaatgagagatgtcaagatgcattctaatggcagcctcttgaagatcttaagttgtttttggttcactcatttcgcaaatgaattcatttagcaaaagcactatggatacagtgcttacctctaggaagtaagttttagcccaaatgctgcagaaggatcatgcttatgacaaaggatgatggactggggagagagaaaaagaaaagacagacagactccaggaaggaaggtcagtctgcagctccttatagtggctaggagaaggagtctaggcagatacgactcaattagcttcatctgctgtttgtctctcaaaatctagacatgtgcactgctctggctggcccacctatcctgggcattgagttaagtgtgggggctgtgtgttgagagtccccctccattactggcaggaactccacacctcagacattgagccccaggtctgcagggagaagacgtgcttgcaaagtgagctaaaagcaaaacagcctctgacctggcaagcattcccaagtctgcacgcctgcagccagaggagagggtgatgccaggctgctgctcagatgcttttcagccatacccaggccaagacctggtgaccaggcagccagaaggagttccaggaggcacaaggcaggaagttgggggattaggaggtgtagaatggagaatgctctggggagatgggtgctttgttggtgcaactattcgtttattcctccagtgaccacgtgagcagtatggctgcacacacaggctctgcagccaagctgcctgggttcacatttggtctctgtgctttggaaaatttcataagctttctctaccagtttcccttattacccatgagattgatgtgaggattaacctagcatgtagtaaatatcctataaatattattattcaatagtgtacttctttgccaggaacaaaattcacctgttcctctttaaatgtcctccagtctgtctcctgggaaagattcttgtgagctccctggggacagggaccatattttgtttgtctcactgtatccgtagtgctttttgctaaacgaattcacttgctaaatgaatgaaccaggaacaacttaagaccttcaagaggctgccattataatgcatcttgacatctctctcctttccacatgcctttgtccgagctgtttcctaacccagtatttcactacccctcttctccatcaatatttggaatgagcaaataccgttagtgcatacctcacatggtattataattatttgctaatgcgtctgtctcctccatgactctgagctccttgagggattattccatgttgtaccccaggtgccccatgcagatgtgtattttgtgcactgttctgtgtaggctacaaaggaaaaggcctagcacctgcccttggggagctcacccacccaggatggacagaggtgtgcagacagagctgcagggtgggcacaaagggtccatctgctgaagtcctgcagatgcagccccgagcttgtccctcacgtcagcagcctggctcctggtctcagagagaactgtgtggttcccaagcattcactttaggaagaatcacttgcccctccctggctctctgcttcaaggaactgtgacaaccttgggatttgcaaactctctctttaatccttaagaggaaaatgttttggtaaaaagtcaagattagcagatacactcgggtgaaattctttccctggaaataaagaatagagccattaatatccacagtagagtgactttaaatgcccccggggggtcagcaggaaccagggccctgaggaaaggatcagcgtggggaagaggctcccacttccctgtgaggagctgcacatgcagtctcactggagctccctgctgcaatgctgttgcctgtggtggttggtgtggatgctgcctgccaagagccctgattccccaggaagagagaaaaaggcttctctcaggacggccctggtcgcatctgcctgtacaattcctggagcctttggggagctgaagtcaggggctcaagtgcccctgggtttcctggaggaggcaggtgtggtgagacagctgacagacaggagaagggatgctctgaggaagtgactgtccagccatgggaaccagatggcccctggctgtagtcctgatgctgccacttgctagctctgtgaccttgagcaggttacttcacctctctgagacagactcactgtctggacaatgagtaaaaccctacctttcctgtctcagagatttggcaatgggacccaatgacatcaattggaaaggatgctgtgggtgaaaggtaacctttcaggacagcgacaagcctgtctgggcaggatgaatgggctgtggagccctgtatatcctagctcactctttgaacctcagtttccacttcttccctttttatttattgccggggtcttaaatgagtgttgggggtatctgattctccctctgcctgtacttttggggccaagcactgagctgaaaagacaattcctcctagttctccaagcctacaacctgccccctaaccagctgtgagctgtaatacattctccagtgtcactgtgaggtttgtgccttcacccccattttatagatcaggaaacagaggctcctccaagtaaaggagcttgcctcagatttcacagccaatgagtggaaaagcctctgggattcaaatgtcagagcccatatttttcctacttctcgcacctgttatcatatgctgcctcttcctttaacctgcagttccctcccttcacctccaccgtctcaatccttcccactctttaaggttcagttcagctatgacttcttctatgaggctctactcattttctcagatttcttcctcctccaaatttcttgtaaaaattatgttttttctctgattctaaaagaatgcacattacattagaaaagatacacaagcatacagaagataaaaaccacctaatatcccatcacccagaagcttccagtttttctttatgcatttgcatatgcatttgtgtttacttttccccaaaagttctccgatactttgtcctacttttcttttgacccttataacttcctgacttcggtacctttctgatttgccctaccagagtgtgagcccctggaaggcagcctctgcaccctgattcaggttgccacacatatgccagctcctagtgggctggagggaaggacatgcggttggggaactggaagactcatgctttcagctgtgtgcttcctccctagagtgcaggcagaggaggaatcgaatcccctcagcactcttgtaaagaccacagcaatgagtgagagatggtgcctgccagacataccattctttacttttcagcttaaaacagatacaaagtttggggaggctcactggaggaggcttggggctacactggaaagagaagaacttggattcacaccccagcttcccctcttcccagctctgtcacatttgcaaactctgagtctcagtatcctcatgtgtaaaatggggatagggtttatagggttgtaaggatgagatgatgagttgtttgcaaacaacttctcacagtgcacagtgaaggtcagcaatgagagccagccccgccctttcttctttccaaatgattaatatatctgttaccagcctccattcattatatagctctgtcatgtgctaagcaccatgggggctgaaaaagatgttcttcctgccttaaaattccactggggatgaacaaattacacgggagctgatcagagaggaaggcagtccattatgagggctaattgagcagtgcagaccatgttgcaaactgagttagggcctggagagcttactgtgtgctggggtcctcaggaatgccacagatgcatcaataaccacctctgctactctggaagtagtcacatcaggaagactccagagataagcttatctgggctgtggccacagagctggaatttgtaagctttaggtttctatgtctcatgttaccagcttgtctataaattgtaaattacagccatctgatggttagggaatatgaagtttggttaagagaatgaaatgagaccacgaagattagagaacaggaaaagaggggactggggactacatacccatcagaatcttcattcagtcctgaccctcagcaggagggggatttcatcaggctcatttccatccttgatttcgtccatcctggttctcctgacaaggggcatttatcagagttatggcatgggaaatcacaggggagtaatgtaccatggcatttaagagtatgaacgttggagtcggagctattttctccgctacttactagctgtgtgactttgggcaagttacttagcctttctctgagcctcactttctttatctgtaaagtgagggcgatcagaataaacctccttcatatggttattttgagctttataaagagacaatactggctgagcacggtggctcactgccagtaatcccagcactttaggaggccaaagctggaggatcgcttgagcccaggagttggagaccagcctgggcaacatagggaatgagactcctgtctctacaaaaaatatacaaaaattagtcaggcatggtggtacgtgcctgtaatcccatctactcaggaggctaaggcaggaggatcgcttgagcccaggaggtggaggttgcagtgagccaagatcacgccattgtactccagcctgggcaacaggagtgaaaccctgtctgagagagagagagagagagaaaatactactatggtgcttataaaagttcaataaattttagctgttgttagtattattaaagtaagatctgtatgaaaataaagcagattttttcccccaaatgttcatgtcagaagtatatatttcattggcaaggggctgcttctggaaggttgagaggtatcctgggggaggggatagagcactggcaaaattggcatcacaattcaagtcacctcactcagtgttttttaagttatcaaaatccacagtatgaaaagcatttgacattacagtccactatatttatgcatttataaacaagagaaaaaatcacgaaaaatacagtaccacgtgcagtacacactgattccatctattctttttttttctttttcctcaaatgcacttgccgcctacttattccagacccaatgattgggtccctatccacagtttggaaaacactataagaaatgattgtgtcctctcactttccctctctgggatttagttttccaactataaaatgctcctgatgcccagccagcctcaccgctgctccgagtcaatgccaggaacgctgatttagcacatgctatttggagggtacccatccaggtgctgtgggagggacagagattgagaagagtgctttctgaccccacagaggccatttggaaaccctgggaatgggtgggagggttggaggtggggattgcttctcccctaagactcagcgtgatggaaaggcaatggggtgggaactaactggtgttggtctgtcccatttgtgtcccagcagccttcctgacagcgagataggagaggaccccaggtacagccttgggactgggtcagaagtgggtctcaacaaagggaaggggtagggtgggggtggaggacttgtgggtgggtaatgctgagtatggattcagggatgtgcagcctacatattttcagagacatggggctaaggcctgcattctcaatgagggcaaaatttggttcttggggacagaaaacacttagacattgcaatgctttgtggctgtccaaagtaccaaacagatgccagtatatctgtggtgctgaaatttcatggtgaatggagtcagaaaatagactagcgattgccagggtctggtgggagagagagggaagggactgccaatgtgtatgggatttgttttggggaagataaaaatgttttggaattagatagtggagatagttgcacaacctggtgaacgtacttttagtttcagaggttttctaaacctctgatttttttttaagtgacaggaaagacagaaaaaagtatatctaaaaaggctctaggggtgatcatggaaaagaaagttaagaaatatgactgtaaggaaaggagatgggtgtccctcaggccaggcagaaaattcagtcttgttgctttatgttcatgtgcaaatctaaaaaatccaagtgatatagattaatgaggctctgagtccctcaaaaccttccctccccttacctctccaaaaaacacttgagataccctagaggtggtatgaagtcaggatgggaaggttggctcagctttgcaaataagtttaagcctctggcctttgctctccaacaccaaagaggcttcactttggtatattttctctgccctttctccctccttgtccccaactgtcagtatgtgatgacaggctcagcctctgtaatggtagtgatcatatttcttgagccaaaaatcagacctcatggcatgtgacaagtttgcatatgtggatgagaacagagtggcagaatatttgacacgggagcagcttgggcagtccagggcacatggcactgcacctgacatccctggcagatcccccacattccgtggttgtcttctgatggggccatatggggctgcagatcatgcctggagccctcgcagctccagggctgcgggttcccagccccagagtgcaggtgctggtgtcagcctgcctggcctggcctggctctgtccagagcactccttgccccagctgtttgtgcagctgtatcagcctcagacctcagcctattcattccaacctgaatgcagaggctgggtctggaggagccacattgcgggcttcatactcctgatctgacaagttttccccccagagcctgcaccaatggcacctctccccattctccctcttaactgggtcctccagggccctcctcacacacccacgtggtcaggcagcagaggcttccccaagatgggcacaccccactctccacacctctctatgcagcatttgtggctacagactgggtccaggggattgtaaaggcatgctcatgttgggttggagggagctcaggatcttcctggaggatatggttcactcccatgagagctcagtatgcctttcctcccctgctgcagcccagagcgggagacagcgaccgacttggatatcaggtactgcgtcctgggaacattgccccccagggtcaactccctccagggtgctctcaggcccaagggagccacatcaccctgctgggcagcccccagaccccagccccagtgttgggggaggccagggagggcccctgtgctccaccaggtggctcgggagctgctgctgtttctgtgcatccatttactcccttcacataagatcatttttatctgggatctctttttcttttttcttcaaaaaccacatcactcaaaatgtggcttccttggctctgcttttaaaaaaaaaaaaaaaagttcttccatttggagaattacctgctgacttcaaagtccagtggcttgagggctacccaaagagggaggaagccagaagttgagtgttcccttggtttggtcacacttttgggctcctccctgactaaggaacaacagactgcagggctggggcaggctgggtgtagggcagggaggggatgaggtcctgctgccccagtcagttgagacccagacctctcaaacctgcctgggggaaggcaaggccaccagaggccacactaagcagatttctaccaactgcacctccccatccccttgcctccatctgagccatcagcttgacaactgcctctgagaacaagcccctgagaatgccttccgcaccccctactcccgccctgctttttccaggaagagaggccccgtggcctatgcttcgcagaaaccatggctgctaaatgccactgtggaggagaacatcatctttgagagtcccttcaacaaacaacggtaaaagcctgtcggagggaggcaggatgtggaggggaggaactgtctctggccagcctgccccagttccgggcccctccatcgatcacccacacccagccatctcactccccaggtgcttacctgcactccagcctctccatatggtgcacctggagaggggccaggtgtgcctgagcattggggcaatccagctcccataggggagagggcaggaatggagggaagggagagagccccgctgccttttctctagctggtgggagggctagctagctctctctgtgagtctccattcgcctggctcctgcactattttccctccaatgataatagttagggctagcatcgactgcgctcttactacataccaggcacagtgccgagctctttgtacacggaatttcctctcatgcttacaacaacctcagtaggtagatattattgttattcccactctacagatgaagaaccaagtttcagaaaggtcccaaggccacccagccagtaagtgaccaagatgggtctcaaatccaaagctgcctaacacctaagtacatgtttgtcaccaacatactctgatgcctccatgaactctggctggcacctgcccaggctaagggctggctggggaagtatgagaggaacaggctgggcaaatatttgaccagccatcatcattactgcctaaaccaaccagcagtggttttccctgcagtgccccaagcacgggttccggctgcagcttttcccactgcacagagatcatgagcgccctttcatcacttactctgcatatttgttcccaaccaattccatccttctagtatttaacctgcccaaacgctgtgtgaagtgctgacctcagctcttttcaagctcacacggtgtttgcttgcacccaagcgggaggcctattaaagccattgctcaccctgggcatagctacccagagactaatgaccctctgcaagtgctcgggccaactctgaccaggctgaccagctgcatcccctgcctctacccacgccaggtacaagatggtcattgaagcctgctctctgcagccagacatcgacatcctgccccatggagaccagacccagattggggaacgggttagtagcagcctctgaggggttttttcaaagccaggacccccaacctaccatgccctgagacactactcaggacaatgggtaactaggaaataggagacattgaaggctgaagagttgcctgcagtaaggtcaaacatgttgttcttgatgatgtcctttgacaggttttcagtcctgcttggagggcaaggtcagcttagtgccctcccaggctggggatcttcttcatttgcaccccaggtatacactgagagcccacacagcactgtgctcagcctggggttgtattgttcctgttcatcctccagatggggtcccctccacaagcttagacgaacaggattctcctgtgactgtcctccttttgtgtgattttaatccctgctgcctctgtctttgtttgtactggtcagatggtccctagcgcctacacaatgaatctttaaagacttggggctcatgctgccctcttctgaatgaattcagtaaacacgtgcaagttccttctctatgcaaggtgagaagcaggcaaagaagtggatagagccaggcctccatcccaaagagctcatagtccagtagggtacaggacagtgtctcctgaatggctgagggcatgatgtgttcctcctctttggtgacagggcatcaacctgtctggtggtcaacgccagcgaatcagtgtggcccgagccctctaccagcacgccaacgttgtcttcttggtgagtgcaagttcccttggggtcctggtctctggctgcctcccaggcctaactgcccacctccacctccccgcaaccccaccatcatccaacaatctccctctccaggagtaaatccctcctgccagagatattgccttatcatcctagtgatagggaaactgaggcaggcaaggatagcacaaatgacccattgcagacttcagatggagctctgcagtagccaatgaggagaggcaagctgtagttataggctgcctgtctgtgggacagcccaacccctcaacacttatgcagcccgactataagaatggctgataacagaatgtgtgctgccacttcccatcttatgcccagtgcagacattgctaattgttcacagcattatttcccatggaacttaactcatcctcagaatccttctcaacacagcactccaggtaaccactagccatcaaacatgagataaaactaggccaggcgcggtggctcacgcctgttattccagcactttgggaggccgaggcaggcggatcacgaggtcgggagatcgagaccatcctggccaacacggtgaaaccccgtctctactaaaaatacaaaaaattagctgggtgcggtggcgggcgcctgtagtcccagctactccggaggctgaggcaggagaatggcgtgaacccgggaggcggagcttgcagcgagccgagatcgcaccactgcactccagcctggggacaaaccgagactttgtctcaaaaaaaaaaaaaaaaaaaagaacgtattcgcaatccttacactacttcatgtcaagttctgttgtgtcaggtgccttgactgacactgaagaattctaagaaccagtccttggcctcaaagatttagaatctgattagggagacagagctcacccagttcaagaggcccagcccggttcaaatccaaactgtgcggcataaactatgagggggccttgtccagggagacaactgtgagggctggagtaatcagggagggcttcctggaggagagcctcaaagggagagtcaattaaacagaaggaaagagggaggccatttgcacagtgagttggaagaaggaagctcaagtctctgattccagctttattccctcccctctccctacaccacacgcacaagcactcctttactaaagacacttcacagtgggaagattcagtctccgttaccgtctgacacacacacagcgttttacaaagcatgggtgcattcgcgatctctcatgagatttaaacaaccctgctagagaaaagtgaagtggacattttatttcagtaaacgtttatgaagcgtctactctgtgccaggcactaaacgtttatgaagcgtctactctgtgccaggcacaggcacaagaagtctcagttcttgggagtgccataatcaggaatggacaaacaatgatcagatctggctttgcgccagtgtcacgggaatagggaggaaggaagggtaggcgtgggggtcaggacaggatgcaggaggaactggtgcttaggtgagcgaaggatgggtgggagttcacaaggcagacaaaaggcagagcagcactccaggcagaggaacagctcaggagaaggcccagacggcaggcttcctgggaacctggaatgcagagtgctgggaaagcacagatgaagcatgagtctagaagggaaagcgagaggttataaagcacctggaacaccagcccacagggtttgactttagagatgatggggagccgttgaaggtccaggagtcaggcagtgaagtgattagatctgtttgagagtgatatctgacaactgccccattttaaatgaggtaaccaaggcccagagaggttgggtgagttgtccaaagccacacagctaactagcttcagtccctagagcagagttgatagaactctaatgggttttatactcattgtcacccctccccaccatgcctttccctaccctctactctcttcctctcccttctgcccaggatgaccccttctcagctctggatatccatctgagtgaccacttaatgcaggccggcatccttgagctgctccgggacgacaagaggacagtggtcttagtgacccacaagctacagtacctgccccatgcagactgggtgagggggaacaagggggtcaggctatagggggcagggctggggaggctgtcaggcatcttggcaggaaccaatccgttgtcttggtagcaactgctgagggccacaaagcataagagaccagcactggatggctttatgcatgctgggcatttcagggagaccctgtacaggccaggggtttggtatcacctagacccacagacactccccatcctggcccgggccccccatggtacactcaaggctggcaccaagaagtctcaggaataatcaagtgctcacttctcaccttctgattcctgcccttttgatgacccatccccgcagtcatggggagtgcccatttggatggaaaagccctcttcccaccctatgaccttcccggggtggatggatgcaccaccccgggaatcatatgggaaatatggaaccaaacaatagcagtagtaatagaaacttcaggctgggcgcaggggctcacacctgtaatcccagcactttgggaggccaggacaagaggatcacttgagcccagaagtttaaggctgctgtgaaccatgatcatgccactgcactccactacagcctgggcgacagagccttgtctctgaaaatttgaaaaaggaaagaaagaaagaaagaaacttcaatattatcagtagagtccaatgttgtgaaacccctcattaactaaatttccatactcttcagtaggtagaaaataattactttttgattcattagaaagcacttaatttttaagatggagatcatgtaattttgaactctaggtcttgcctactcctatataaattctcctctaaacaacagccaaaattgaggccctctttgagcttcaggctggtgccaaatggctctgcttattttccccaaaataaatcttccttccatgtatgatgagaccccctccagtataaagaagacccaaagaaaatcacccaaagaaaaaaggcccaaagataagacccaaagacctaaagatttaaatatatatacagatacagaaggtttgtttctgagtttctgtagtgaccttggcaataccttgtagttcaggacaatcctgaggaacacagaagtgctggcttccttgaggaatcagtgatcaggactctcgagccccttgaaccccagcatagggcgggagggggtgagggcagcaggggtgggtgtctgaattaatgtcaggtctacgtgatggtgtcatcaagtgttccagataaaaagttttattgagccgggcgcggtggctaatgcctgtaatcccagcaccttgggaggccaaggcgggtggattgcttgagcccaggagttcgagaccagcttggggcaacatggtgaaaccctatctctataaaaaaaaaaaaaaaaattagccaggtatggtggcgtgcacctgtggtcccagctactcaggaggctgaggcaggaggatggcttgagccaggaagcagagattgcagtgagctgagatggtgccattgcaccccagcctaggcaacagagtgagaccctgtctcaaaaaaaaaaaaaaaaaaagatttattgattccaaagaggcatggccacacacacttagaccagcaggtgctttgctaagccctgatggaggctgccagacccgccgtcaagaggagctaagggtagtgtacaatgagcccacttagtgtatgacggccgctgccgtgggtggagtccttgtgagtaaccagccagcttgagcaggatgcactaatttgctctgcaaacccagccattgagaaatacgcctcagatgtaccgaactctaggtcctaggagtatgttggttggggtaggttatcaataccagcccacttgcagtggatgagctggtggccatttgtagtgaggaaagggatgtgtcaacctccatcttagactccacaattgagggatgtgaccaccattcctccccagccagcccccaaaccacgtttgttgctgcctttccagatcattgccatgaaggatggcaccatccagagggagggtaccctcaaggacttccagaggtctgaatgccagctctttgagcactggaagaccctcatgaaccgacaggaccaagagctggagaaggtgggtatatccagggatggccaagcagccacccctggatgcaaaggttctgctagaacctgaactcataaaggtcttcctgtccttagtgccccaggaagccccctaaagggcagatgtgggagctgggcatgaactggctcctaccagaggagagacagtacctgtgccaggtgcccagggcagaatcaggtgggcaccttcgccttatcctgaggtagtcagatactatttagttgcaaagtttcagaaaatcaactcaaactggcaaagaaaactaagcaaagaaaacaagagggaattaaggatttattgacccatgaaaccaaaaagtccaggtgtgtcatagctttaagtgtgctggatccaggtagtcagtgtaatcagaaatctgtttctcccatctcttgactctgctcccctcaaattggctcagctcccctcaaattggctccattctcatggtatcagtgagggccaccagcagtcttaggtttacattctcccagctcaacaactctgccagaaaaaaagtgcctctttccccatagttcagcaaaagtcccagggctgagtctcactggtccagtttggtcatgtgcccacccctgaacaaatcactgtggccagcggtgtggaatgtgaggattggcctgtcctgggtcacgtgccactttgggagccagatccacctgaatcacagagactaaaaacaggggaagagtggttccccacagggatatgggggtgctattatctgatgaaggggaaggactaaatcctggcaagatgaatgtgtgtctgtctgcccctccctcaggcagggacaaagtagaaatctgacattggtcatcaccagagtagttaccccttaacttccccttcccccaccaaccatatatcctgaagacattgcccaggccacatctgtcttttaggagactgtcacagagagaaaagccacagagccaccccagggcctatctcgtgccatgtcctcgagggatggccttctgcaggatgaggaagaggaggaaggtacaggcaatgggactgggagtgaaattatggcctgaggtctgatcagccacagagaggctaaggtttggggttctgggtgtggtgcagtagtgtgcctttgattaaatggcttccctctgtgtgcccccgttgtcccctcagtaagtggggataaaatgccctgattcaccctcagagggatggaaatgtgtagccacagagtgggttcttgcggcctgcagaggaggcagctgagagcgaggaggatgacaacctgtcgtccatgctgcaccagcgtgctgagatcccatggcgagcctgcgccaagtacctgtcctccgccggcatcctgctcctgtcgttgctggtcttctcacagctgctcaagcacatggtcctggtggccatcgactactggctggccaagtggaccgacagcgccctgaccctgacccctgcagccaggaactgctccctcagccaggtgtgactggcggcccatggcagaggttgggagtggggatgggggaagggctgagcccatgggcaccctggaactccaaatcactctctgcctgtgaaggagtgcaccctcgaccagactgtctatgccatggtgttcacggtgctctgcagcctgggcattgtgctgtgcctcgtcacgtctgtcactgtggagtggacagggctgaaggtggccaagagactgcaccgcagcctgctaaaccggatcatcctagcccccatgaggtacccgtctcccctggccaggctgggactgtgagcaagtcactgttctctgagccttagtcttcccatctataaaatggggatatacaacctgtcacaagcttgtgggggtgactcaaggagacagtgtgtgtaaaagtgccctccttgtgcaagaagcagggagaaactggcatttactcagccagatactgtgataggcattgtgtgtggttagctcatttaattgttaccatggccctttaaagtgagcgtctgcacatccaagtaaagattgttttctcctccctaagtgggtgtaatttgcccatccccacccatgagttcagctccctgccctcccctcactctctctccctcagccagcctcaggttttgacactgggggaacaggtagctgttctattaataatttcctgtaatgggatggataaaaatctcaaaggccacttgatgtcaaagaggtttaaagttgtccctgcccaattggttggccaacttggcttaaaaacacaacaggcaaacagattttctggccccttgtcgaggctagacctcacaatctaactgcactttttactttccagcctcatgagttttctgtggcccacagatatggcctccaagtttatttacttttactctctatttgccccagctctgtagttctgaaactccctggttggggttgggctgactctgggtcagccagccggcaggctgtccccagggccctgttcctcttggcaggttgtccctctggagaggactctgtgtcccaggaggacagctgctgagtcaggccgagccggcagctgagaaaggcggcagtcgtcagatgggcttgagaaactgaaaggctaacgaaaggccagcgcccctttgggcagctgcaggaattcacggggatacaggccagatgtctacaaattggcagaggatgccagacccatgaatgactccagagacacttacatgaaataattaactatctcattcagtaaacaggaagtaaatcaatggacaaatgagtaactcttcctctggctgcctcttaggttttttgagaccacgccccttgggagcatcctgaacagattttcatctgactgtaacaccatcgaccaggtacagaggaccgtgccacactatccccccttccagagacacctcggacccctgggggcttctcctgtctgaggctgggttccccagatcaggtgatcacagccctctgggaagaagccagtgtccccgatccgattataatgctgcttcagggctggggcctccctcgtgggagcctcacagtaaggctgagggaaaccagatccctttagcttccacctgagatcccactggctttctctagtaaagttccagcatattctgaaccaaggtggctgattgtatggagaatattcattttgattcagcctgtgttctttatttaccattgtaccagatggtgtgaaaacaaaatcttgattcctacctcagggagtttaccttgtagctggagagatgagatacgtgcctataataaagggagagcaaggccgggctcagtggctcactcctgtaaccccagcactttgggaggcggaggcaggcggatcacttgaggccaggtgttcaagaccagcctgatggccaacatgatgaaaccccttctctattaaaaatacaaaaattagccaggtgtggtggcaggtgcctgtaatcccaactacttgggaagctgaggcaggagaatcatttgaacccaaggggcagaggctgccgtgaaccgagattacgctgctgcactcaagtctgggcaacagtgagactcagtctcaaaaaaataaaggatcaaaaaataaagtgagagcaaaacatggcggccagtagcactctaaacacagtcaataccaaaattcacctcactctctccccctcgtctccctcagcacatcccatccacgctggagtgcctgagccgctccaccctgctctgtgtctcagccctggccgtcatctcctatgtcacacctgtgttcctcgtggccctcttgcccctggccatcgtgtgctacttcatccagaagtacttccgggtggcgtccaggtgatggcctcaggggtgaggggtgggaggtgctttgcaatgtgcagtttggtgtacttgctagactcatcgttatgagagtaatagggtcgtgttccctccaaaaaataaaaacaaaaaacagaaatgaaggaaatagaaatatccacatcttattccaccgccctaatataatagtctgccaacacacgcacacactgaggttgacatctgaattatttccttgggcgatatggtcaggactggaattgctaggtcatgataaatgcacattttatgcccttcattcattttgccaacatgcttcccaggagggttgcatcattctagtggtcaggctgattgctgatgcatgaaatcggcgggcacctgattcaagcagtgttatgataacacctcccagcccacgtgagtccagagtgtagctgtaagccttgacttgagggagcctctcacagccattctcatggatcacatttgccctcatgagctttggatccatgcacgcctctttcctcctcaaaattttctaagaatgttctctagggagttctttctgggagtgattctcccagattcatagaaactcatagattcaaaaaattgtaggaaaaaatttaaagaacgtctaggccagtgtttctcaaactgccaattacagcccatcagtgggtcatgaaatcaatatcatggatcacaaccagcatttttttaaaaatgaaaaaaacatcagactgtattcatagagtaaagcaagctttgcttcatgaaacctttgtgttggtcatggaggtgtgtgagtactgatttgtgagataaaatatatttctgactgcaggttgtggtcagaaaggttaagtacctttcccaagtgcacatagttggctagaaactagagttgagatacttattagcaataataaaatttagatgcattttggacacaattacctgccccaaaggatcaacatttgtataaatggctttttgcttggatgatccagaatggcccgacacccacacgaacaacatagctttttgacactcaaaaaattcaaagtgctgcacaagctgttctacaaagttcatttcttctgccagagaaacagcccagtctctgtggcacccagtctgaccctggagatggtttatcagggaaatcaacttcctgcatcccaaactggcctccctggcactgatgtgcttgtcgaggtgcagctttggggagcaggaggcaattctgttgccatggaaacctctggccttaccccgagacgaaacctatcatttcagcacatcactggccagggtctaaagagctccttgatggggtaagcggaagacggggttgaacgctttgagtttggtcttctgttcctttggccagctgtctcaaggttcagattgttcacctgtaaaatggaactagcactgcctgcccagccttagctcagctccaggctgtgcagcagaagtacagggacagatggcgacctggggttgacaatgcccaggacagcagtaattgtgccccacatcaggctgtgtctaagcattgtacataaacgatctcattcagtgctcacaaaagctcaatgggctggtggcattgtcttcccccttcacggggtaagaagctgaggcctagagaggtaaggccattcacccacacagcggtagcaggtggagctaggcttcaggcccaggccgagccctgagcctgccctcttaactgttccactctgttccccgccacagggacctgcagcagctggatgacaccacccagcttccacttctctcacactttgccgaaaccgtagaaggactcaccaccatccgggccttcaggtacgagtccacattcccccaaggtaggagtggaacaggggtggggccagggggcacaggccatgagatttgattctcaggactccacttgggaaggccaaggacacgttctctctcaagctgcctcaggtcccaaggcccaagggatatccaccagcagggacaggccaggtgggctcccactgaatgttctagagaggaaaattccagctctgtagacaagcccaggacctctgtgaggcagagcatgaaaagagacaaagctgggacaagtcttcatgtatcaacgctagaaagggccttaggtgcgggccaccctaagcccttcttttattaaggagcccctgtgtgccaaacactatgctgagtactgtacaggccaatcccactcattctgcactgcaaccctcggtgctgagaatggtcatttccattgcacagacaaggaaactgaggcacagagacgttctataacctctctgtgtaaggtgccacaaagcccagacttgaacctatttgttcatgcaacaaacatttactaagccccgactatgtgctaagccccatgccaggcactaaaaagatgagtcaaataagccgctgccctgcaggcgtttacagcccagactttgagcaggccaggataaatccacgtgacaagtattctgaaaaaagcggattcaagggctgtgggagcatagaagagagacagtccgggaaggtttttgtaccagaggtgtcatcagaactaggactcaaaggaggggcaggagttcaccaggctgaggaattcctgaaaacttcagtgcccctgccatcgtctcactaccctgagtggtgatgttggggtggacaggagcatctgaggttgcctggggaatgagggaagctgttgtttcccactccccaagagtctgtctgatctccagaggcatctctcttccagtcaggcaggccagagacccctgacacacaaagttgggctcttttctcatcttcatccagagagtgataataggttatttttagggtggcacagctgcacgaagtatgacagtaaccatgagacaccaagcactgtgtccaggagtaaccatagggcacaaggaccagccaagggccagagaggcttacatctcctccccccaacccctgaagtccagcttcagccctggagaggtatccaggcccctctgcccaccctggagcacctagggccagtggaaatccacctcttagggatcttgtctaagtaaagaagagcagagcaaagctctgccctggccttggcgctgctccctggacatcccttgcccctggacaagcctatgctgtgtcttccacaaagaagcttgctggggactggattatgactctagagtctcctcccagcctcctcttctcaagcctgaacttctcccgttccttcaacttccaggtccctcgacattactgagcctagcctttgctctaagttttggtgatttccctctctcaattggtgtctcagagggccctggggtagagagatggtgactcttctagagtgggccacagccccttgtgtgcagatcccagcttcctgtaaacagcctcagatcaggccaaacctgtggtcagccagagccactgctacccagtgaggtcttccacaccctactgacacggtgaatgatttttaaatttgaatgaaaggctttttaatcaaccccatacacatttaatgcattggctttaatccagcagcctgttgagagctattagcacttattgattgcccacttactgtatgccaggcaccgtgctaagtgttgtatgtgcattattacatttaatcctcacaaggaccacataacataggtacgaatcgccacattctccagatgcagaagcgagacccagagaggctgggtaatcaatccaaggtcacacagactgcgggggctggcgctgagcttggaacccaggtttgcctgaccttctgggctttcctaagagatcttattttttcccaaaagagtttcaagagtgcccagcactgggctcagtggcgggctcggaggttgttttcgttcatgtaggaactatcacttccccatttttttcataagaaaactgagtctcagtcctgatacacagccaggaagttgtgatgttcaggctccaacctgggtttacatggctccgaggctggggctcttttctagtcctcagacacactgtcgcacgcctgtggcagaagctcccatctcacacttgccgaccctcaactcacacagtcctgagacccacatacgctgagcgcctcacactcctataacacgcacatgccctgatgcacacacattttcaacacgcacttactctacccttcaggcatggtttcacactcactgcagacacgtcaccctcccacacgtctccaccctgggggtgtgcagtagcatgctctctcccacctcagaacctcccttcagtcccctcagacacatgccctctctccacgcagagacaatcaaagctgaactaacaccttccagggtgaaaagcaaatgcccagtaaggtacgtcttgggtgcctccgtgtcccctgagtttggtcctatcaaaccagcgatgatgaggcagcttttctttcgttccttcctccatcatcaaacaagtgctcctgcatctcctctgggccgggcctacgtcagcaaggtctgagggaagcggccaaggagagtgatgacggcagcccaggttgatcagagaaaggaggcaggtccatgcgcagtaactcagggaaaacatgatgaggacctaaggatgagaaagaagcctccagagttccctgtgcagagagattccatcaatttcagagggtcaggggagtgccatgcattcatccaacaaatatttattgatagtgccaggtgctggggtatattggtgaataaaacatcttcatggaatttgcagtctattgagggagatgattataaatagctagagaaatgcatgtacagcagatactgtggagcaaacaggttgcagacaataataggggaaacctactttatagtaaggtagtagccaggaagagcctctctgaggaggcagcatttaaggcaagccctgaaggttgagttgagccagccttatgaagagcaagggcaaaagccttccaggaaaagggaatagtgtgtgcaaaggccctggggtagggaagactttagtattgtcacagagcttttaaaaagctgagtggctgcagcatagtgtgtggggtgtttgtggcaggaattaggttggcaggagggggttcttcatcctataagcagtggaaggtcattaatattcttttttatttgtttttttttttttttttttttttttttttgaggcagagtctcactttgtcacccaggctggagtgcagtgaggtgatcttggctcactgcaacctccacctcccgggttcaagcaattatcctggcttcctcagcctcccaagtagctgggattacaggtgtgcaccaccatgcccagctactaatttttgtattattagtagagacagaattccaccatgttggccaggctggtcttgaactcttgacctcaggtgatccgcccgcctcagcctcccaaagtgctgggattacaggggtgagtcaccgcatccggccggagatcattaatattctaaacagtgggggagaggacacagtttgcgatttagatagattaagccagccactgtgtggagcatggactgtagggagacagcaggtagacgtattcaggaagctgatgcagtagtccaggtgagagtttgtggtgggcaggaagcaggatagagggggagggaggcaaggactcttttagagagagacataagaggacttgccaaggggctgaatgtgaatccaggtgattcctgggtgagaaactgggtaaagggaggtgccccttattataatgggaaagacctagagaaaatggatcttggggtgaaaacaagagtttggaggaggtggggattctggacaggtttgaataagcagaaaggagtggggtggacattccagagagggatagcttacatgaagtggccacggtggcatgtctggggactggaggggccctggagcctccctctgcaggtagggagactcctaggagctatgtggaccaacactgttcccttaggagcttctcatcctccctccaggtatgaggcccggttccagcagaagcttctcgaatacacagactccaacaacattgcttccctcttcctcacagctgccaacagatggctggaagtccgaatggcaagtgctattcccctctaccctggcctctgataggagggtggggccagagcaagagcacacaggtacctggggatgaaagagaggataggataccagatcgtgtggacaccaagccttcctgcttcccccagccctggtggtcctcctagtgtctagcctgtgctccttttccccatatcactgcctggaggcttgtgtatctgaggtgtgtgccagtggcaagaacagttgtggtgaatgtgtatctgcagtgggtcatatgacacccacattgtgtgtgtttgtgggccagctgaggcgtgcatgttaaagggtgtgcaggggctagggggtaggggagcatgagcttgtgggacatgttggctcctggggctccagccttcgcagcccttgtgtgtgtctggtgacgtgtgcatgagttgcagggctggagtggaggcctggctgagctgctctctgccccgaaaaggagtgaggtagaacaggggcctgtggctctaacccctgagcgcccaggtcagctcctctccctccccaggagtacatcggtgcatgtgtggtgctcatcgcagcggtgacctccatctccaactccctgcacagggagctctctgctggcctggtgggcctgggccttacctacgccctaatggtgagcggcagtgggctagggcagaggaggggtcagacaccagcactcccggagcaccttcgtcactggagacatgagacactcccaggccttaccccaatttcatttgcatctgatgccagagggacagtgcgggcaggaaggctgaccagcaggccccagggcccaggccccagacaggtggaggttggggagccacatgactgaccctccctgtgcctccagggagggctgctctgagcaggcagtggatggcagcaaaaggaatctggggccctggcccctctccagccttaagaagagccattctggtggctgaggacagaactaagcgaccatggagtgtgcgccactggcttgctccccacaggtctccaactacctcaactggatggtgaggaacctggcagacatggagctccagctgggggctgtgaagcgcatccatgggctcctgaaaaccgaggcagagagctacgaggggctcctgggtgagaggctcagggagaggggtggggaagagtccaaggaggagtgtgtctgggttgggggccacaagggagcctggggatggggtggcactttcggatactagctgtggcccatgcctggtggctgagcccagcccggcccccagcaccatcgctgatcccaaagaactggccagaccaagggaagatccagatccagaacctgagcgtgcgctacgacagctccctgaagccggtgctgaagcacgtcaatgccctcatcgcccctggacagaaggtcagagcacgggcccaacccaatgctgcaggacaggcgtgagcaggggatggggcatgcacggagctggatggcttcgcagtcacctcgtggccctccagggccgaggcctctcactattcagacatcgcagtctcctgccctgggcctgtgggggcccatctttcctctccttctattgccttcccccagtgctgccctcaggccttgtcttctcactcatccaccaaggagaccgacactctggactcccccagctcacacgggctttgtcagggcctccctctctgcgaatggtcaggggctttccctagggcactgccccgagcttcagggcagggacctgggggcagacagcgaggccacccttgtattgagggtgagcccctgcctatggccctggcccagctctcctctcgtttcccactctgtctctttgtctctgtctcactttgctgtggctgtccatgtcattctctgaccttgggatgtacctctgtccctgcctctctcatccttctatgtcactatctgtctccgtattgtaatttctgttggtacccaagtgccaggaagcaacgggatcagaggtggctccattgtagggcggggcacacagacacatccatgcataccactctcagctgcccctgtgtcctcctgccacacccatgcccatagagacacaccactgccccccagctctccttcagccaagtacccggcacacccagacccacaccaaggcccaggcaaatggacatccatgcctgcacttgcgtgccggtccctgtgtaagccctctctggacccactgcaggaaacaagcccaaacctgtggtgtccaaagagaaactagtcagaaaaccaggccaaaaagataccctgtgacctcccacacctgcacacacacccagagctagcatagaggctattcccagcagccccagagtcccagtggcggtgcctgcttctctctttccagatcgggatctgcggccgcaccggcagtgggaagtcctccttctctcttgccttcttccgcatggtggacacgttcgaaggtgagttgtaaggcgggcaccccacgtgtacccacagccaccagatgaggcctcagccctggcacgtggtcagacatgacaggaggcccagcagtcaccgccttcccctgcaccctcactgggacccatgcagggcacatcatcattgatggcattgacatcgccaaactgccgctgcacaccctgcgctcacgcctctccatcatcctgcaggaccccgtcctcttcagcggcaccatccggtgagccccaccacccctcaggcccacccagccccaggccggctcagttccatcagatctggagcacaaagaggagggggttgggggagaccaggatcccagaggtgtttcctgctcatgcccttctccatcccatcaggcccaggcagcctctggaaggggatcccccacccatgggtctaagatgctgtcccccacccactgccaccacctcggtgcttctcccagccagacctccaactcagtctgctctcgctcactgccctctttgccgcctggggatgcaggcaggaccctgctccctccctactggggctttctgtgccacttccagatttaacctggaccctgagaggaagtgctcagatagcacactgtgggaggccctggaaatcgcccagctgaagctggtggtgaaggcactgccaggaggcctcggtaactactcctggctatgcagctgggttggttgggcactcaaggaccctgtaaggatggcagacagaagcccgtgtctcaggtttgccccaagtttggagtctgaagcctggcaggaccatttagtcctacttctcactatacgggggcccagagaggtcaggtgtcttgccccaggtcacacaactggtcagttcagggtctggctcctcctgcagggtacagcgggtacagtcagggatccttgtgagacagagattgcgagtcccccatgccaagggggcatcttcagccctgccctgccccatccacctgcatgcccagttctgccttaggggaggagaagatggactgggcaatcatagacacgggtcactcatcaaggccaccggtgattggcaaagccttggtatatttgctgcagctcctggagcattgggggtggccaagccttggtttcaatgaatcaccctaccaaggccctacatacacactcagtgcacccctcagtgcacacgccccctcccagaactgcccagggccacagcagcacacacctccaggggtgcccttctcgttgcagtccttgcagacggcctccacattgttgtgtcaggtgcaccagccctgcacacgcctgtgctcttggacacacacccacctatttgcccccatgcacacattttccaacagccccccaagccatcccatctgctccactcacagcacaagattaactcagtcctacttcatctccccgggctgttttcagatgccatcatcacagaaggcggggagaatttcagccagggacagaggcagctgttctgcctggcccgggccttcgtgaggaagaccagcatcttcatcatggacgaggccacggcttccattgacatggccacggttggtcctgggcccctccatgggaccatggtcttggaaagggtttagtgggatgctagggagaaatttgcacgaagtagtcctgaggctcaagttgcctctaacatcaaatgctatgtgttgcagaaaatgaaaagagctggggggaccctgactctgtctagtcttagggaatgttacacacacacacgcacacacaaaaacactatgcaaacacacacataagctgcacacacagacccacacagacttcacactgtcacctatcacaacagcacacacacagccacaaccacaacctacatacacacacagagctgagctcccaacaggctgagtccagtccctgagtgccgggaacctgttcagtcctgtggggtgggggtgggactaggatcggggtcagatgggagctgagccacagacctgggctccacatcccccaagccaggccagaccccatccactgggcaggtgagccaacagctgttgcccccacttggcaggaaaacatcctccaaaaggtggtgatgacagccttcgcagaccgcactgtggtcaccatcgcggtaaggggcccattgatggggtgcagagggacacccagggacaggactggcctgttgtggccgtcatcagtgcacagcccctgggcttgcctggtcccagtaatcaagaaagaaccctgaagcaggcagttcagggcaaggggcctggagggcatgcagggagcctgggttgcaggatttggggtggggggttttgcccctgtgcttccctcagacctcccctctccttctccaggttccaaggcctgcccctgtcccaaggccttatatgttaggctggcgttacttctccataggaagtgggggaggggttgtggagggtctctgagccttgaagcctggaggtggggtagagttgggacttggagaggagagaagggtggtattagcagatggagagcttgtagtcacatccaccccaggaaagtgcagtccccacagtgacaggacattctggccacatgcctcatcctcctcctccaagccgcaggagggccaccctcagctgtggcccccaccgcgggtggtattcccaccatcctgacccgccccctcctgccctgcccagcatcgagtgcacaccatcctgagtgcagacctggtgatcgtcctgaagcggggtgccatccttgagttcgataagccagagaagctgctcagccggaaggacagcgtcttcgcctccttcgtccgtgcagacaagtgacctgccagagcccaagtgccatcccacattcggaccctgcccatacccctgcctgggttttctaactgtaaatcacttgtaaataaatagatttgat

SEQ ID NO: 15333 - DNA, 83947 bp, Homo sapiens
gaggcgcggcaggcgcgcggagccagcggagccagctgagcccgagcccagcccgcgcccgcgccgccatgcccctggccttctgcggcagcgagaaccactcggccgcctaccgggtggaccagggggtcctcaacaacggctgctttgtggacgcgctcaacgtggtgccgcacgtcttcctactcttcatcaccttccccatcctcttcattggtgagtgcgcgcagcgagccgcggaggaggggacgggagagcagggagggaggaggaggcgctgcgcgccgcaccgctcggcgtccccttccggcccgcgaccgccgtccgcctcgttcccggggtcccctgccctgtgtcctgcccgccggtccccgcactcgcacaccagctcatcccttcactcccccggtgcccccgatcccgcgccaaacacagcggacgtttgtgacccatgggatcaccaagttttgcttctgcagggccaagagctgggatggggaaaagggaaagaggaggtctcagcacgcagtgggaaactggagaggggtcgggcctcaccctccgtggcgcagcttagggagccgggtcacccctcccgcaaggcagcctccctgtcagccgcagctgggcctagggaagagggaagcctgtgctttggagtctgggatggaggcccagctaacccctatgctttcaccgggctgagccgcgcagtggtccgtgatctctgacagtcccaggcccgcgccctgggcgaggagaggcgagagctagggacttggattcccttcccccgccaccccacccgggcatgtgtctccagagcgcaacttctcaggctctgcgcaaagtagctccgactcgccgacgcagcgaccccggcgcccttgcttgcaaagttgggcgccacggccgggacaatcgtgcgtgcctctccactgaggtcccccccatctctctccaagaccttgactcttccagaccagtcaagtctatcaactcatagggtgtcccctgcatccccaaaacgtgttcattcactttaagaaaacaagcaaatcttaaaattcatatacagctttggggaagaaaggaaagattgtcacaaaattagatttacaagaggttgctgcagaagcagagttgctagttattaacaaagacagttagatagaaatagaaataaaacatacaaaatatgtgctcatatgtgcatcaaaaatcaaaaaagaacagcatttacacttctgttctcagccaaacggtttattaacctgatgacttgtcacacaagaagttagtatgtataatggggtaccttggcagggcacagtggcttacatctgtaatctcagcattttggtgggctgtgacaggaagactgcttgagtccaggagttcgagaccagcctgggcaacatagtgagaccccccccgccctttctacaaaaaattaaaaattagctgagcatggtgatgtgcgcctgtagtcccagctactcaggaggctgaggcgggaggatcacttgagcctaggagatcaaggctgtagtgagccgtgatcgtggcactgcactccagcagaggcaacagagcaagaccctgtctcagtaaaaaggtgtggtgggggaggtaccagcataggaccaggctgaatgagttggacgtttagtttgtgtgtaccagccttggggatcctcatgtgtaggtgtcaccctcaccatggacccaatgcccaagcacctttctggggttcatgcaccctcttcctcctccaagtgggcaggcatcctgcctctgactgtctctccctgcaggatggggaagtcagagctccaaggtgcacatccaccacagcacatggcttcatttccctgggcacaacctgcggtggatcctgaccttcatgctgctcttcgtcctggtgtgtgagattgcagagggcatcctgtctgatgggtgagtgactgtctgaggactcaggaaagtgaatctgctccagggtacttcctgaaaggcccaaggagatcctagctcacctatattccacaagcccatgtcttttgttactacatccagcagctcagtgtcttctatgtgccaacctctctgagctgggcactggacgcaagtgagtcccaggccctgccatcagtccaggagagcagagggaacacggacctgcatgccaagtcccagtgaaataatgctagagcctattagaatgccacaactccagtgaaaaatgtctggcctcttctacaacctgccggagttaccttcttggaaaaaaaaaaaaatctaaccatgccacccactcttgcataagacctttccttggttctcagctgttttgaagatgtggtctcagatcctcagcccaccattcaaggtcttcacagtcagccccacctatctctggcctcattccccatgcccaccttccgtttgggcctcacagcacactcctcacacctctgctacagcacagatcacactgtatgttaaagtttatgtctatttgcaaaactgtcttcagagtcagaaaggcctaagagttagaatctgagtcttgttcatctttgtgttcacagtgcaaggcatgtgataaacataaacattattcagtccataaacatttattgggtccttaggagaatgaatgaaaccatgttacaaataagtactctgggaggtgagaggaaggcagaattgggcaagctccatggttgagagggctttggagcggagtctggaagggtgactaggcttcagacacacagaggaggaaggagagagagaactggtggtgcctgagggaagggaaaaggcaccaaagagaaaagcaggtagggctagggagcagcgcaggggctggagcattaaacacaggctggggagcgatggaggctgaggctgggaacccaggttggggcatctcaggaggactgtgaatcccagcctgcatgtttgggtcggatttggtcagcagtttggaacagaagagagatgtcatcagcataacacttttaggtgggaacctgaggtgttcagcgcaggctggaggcagggagaatctagaggtataatagaagcaggacttagcattgactgcagtagtctaggtgagcaataactgcagacagaaatggtgtgtcagcagtcagggacagaagaggagcgggagcagccatctcactaaggaagaatccagtaaccagcaaggatgagagactgccaggagagggagtggtggaggagagggatatttggcttgagtatctgaggtccagcgccccctgagctggaatcagattatacccagactgcactcctgcagtgctgcctggctcctgtagttggatggcaggggataggctccctcatcctccctcccgttccccaccttcccttccccaatgtccctgcatcctggcttcagcagtgatctctaaaatacctgcttgacttggaggcagcagctctgcctgcttattaaagtccctagaccagcaagaagaccagaaggcatactgctacacaagcacgtgacaagtccgcctccacccccacccctacaccccttccaaagtagcacaaatgccacagtgagccctcagatgggaaatactcaccagatggtgacagagaaagacacctccgcccttggagaaggaagacctgggtcttcagtgagcactgctgctgtgtaccagctatgggactttgcacaagtcattcaggctttctgggcctcataagcatttataaacatacgataaaacattttagttgccaacttaaaaatgtgtgagaaagtataaggtgtttcaaaattatttcaaggagtaaagaggcaagagttttgaagatccctgggcagggtgttggctgttcccagtgtggccattcatgactgctctctggccttatgaaacaagcatcatagtccctggcttgcctgcttcatggggctgtggagggtgaaattcgagcatggacagggtgcagagcccggagtggcagagcactgggtagactgtgtattcccagaatgtgggaaactggaatgaatcggtccagggatgccctcctgctggctgtcagcagcccctcctgtgtgtggctgtactgcttcagctcagtgcaaagggccatctcctccccagggcacagatcagctcaagctgagtaattgtcatctggtctttgtgagctcctacccccaggcctgagtgaggggcaggaaaagagcagacaggagaagtcacagacccttgtgatacctccagtctaatccagcctgggttttcagagctgtctggaaatttagggggcaggtgggagggggctgattaaggcagccctgatttgatttagagtgagcctcatttagtgactaattaagccatcttaaacctgtagggcttcccctcttcctttgggtattatttctttctgtgatgttctgaattcagaacaatcaaaacagtataagttagtgaagaagatattttttaataactacaatattttcccagaccaccatacactggataaagcctgtatataaaactttacctaatttcttaactaattgaatgtgtattatttaacaaagcagctaaaaactattctatgaagccatgtcatgaaatatttagttcaattatggttaatcctcatcttatttcgtcttataaaattttaacatttctacctcctattgcaaaaaaaagcatttatatcagcatataataaaacatgtctagatgtcagcttaaaaatgtgtgagagagtagagggtgtttcaaaattatttcaaggagtaaagaggcaagagttttgaagatccccaggaagggtgttggctgtgcccagtgttgccattcatgactgctctctggccttgtctgtcttgtaccttctatattagtttgaagaccttttttggagaatattcactaaagaatatcaatatctaccatttcattaaaaaagaaatgtggagtttgccttttcaagttggtttgatgcttattgatgttttcagggacccagcctcttcccatctttccataccatcctgtgtgtgtgtgtcagcctatcttccccatggtcacaaggtggctgcctagctccgggtattgcttagcatgagcagagagggcatgctgccgacatgcctctcctttatgacagagatcattctttctttgacatctcactggccagaatacgtggaccaacactggcaaaggagtatggaattgcatggctgcttaaaccaatcaccatccattccctggggctgggtatattgctgctggagcaaacctgtggtcctcctggcacagaataaggggaagatactctttggtggacagcccacattgcctctacacttgcacctcagtcccaccagacccactgaggtcacaggatagctctcctcatgtccttcctccttctctgttgaactcttatgtatccttcaaagtccagcctggtgccacctcctctgggaagctgtccttggttgcccaccccctcctttgtgctctctcagtctctgtccatcggcagtatcacttccctagcctgctgactccaacagttagctctgagcatggcagccccctccataccatcagcttctcaagggcagggacccttggcacactggatagaagtagcctggtgggcaacagcagcactgaggcagcaagctgtagcaggccatctgggaatggagtgggtaccacagggctggagcagaaagggcaggctgggcagatctgataaagtggctggaggccacatagcctgggcctttcgttccaggctgagcagagtgggttttgctgtctgcaggagggagctgtggaagggcatgatcacgaccaactaaggtgaccctcctcaccaggcccagggaagactgaggcctggaaggaggctctggctgcctctgggtcttacccccaggccacagtccacccacttagaggcctctgtgagttaaggtggagagactatgagctggtattgactgctccattccccatcccgagagaggagacaaaatcagtgaccttggaaatgcctcttcgtgcctcagtttcctcaccccataaaatgggagactaagagtacccactcgatggggtttaatgaagattaaatgggttaacatatatcgcatgcttagaacagtgcctggcacagagtaaatgctccataaatactgactctcatcagtttgttatcacagcctctggggagggcgccagtgctgacttatgctgttcgtgttaaatggggctgtcactgggtgagttgtggcatacaggcccctgcactgttcaagagaccccagcaacccttgtgcttagggctcagcacatagtaaggcctccagatcatatacccagctctactccatgtactggcagctctgcccagcccataccccaaatacgcccattaactaaagggccctgcagcctataaagtgatgctataaaggttcagtgttcagcctttgaaattcaaggcctgggctgctctattgcagtacttagcatgtccccatcctgtctgtttctctctcccatctcagggtgaccgaatcccaccatctgcacctgtacatgccagccgggatggcgttcatggctgctgtcacctccgtggtctactatcacaacatcgagacttccaacttccccaagctgctaattggtaggtgaggtgtaggagggaggggcagtaccttcattcatttcttcagataatgtttactgaggactcattatgtgccagctattgctctaaacagtagagatttggaatagaaaaagaaaaaaatccctgccttcatggagcttacagtctggtgaaggaggatagacaggcaaagacagtgaataaacaagcaaacaaataggtggtggggatgctatgaagaaaatcaagctgagtaaggggtaggggcaatgacaatgttgctatctacacaggatggtcagggaagggctgtggtaactgtgggcatgcagatatttgggggaaggtattccctgcaaggggagtgacaagtgcaaagtcctctgatagggatagatttggcaaagatgtcactgtgggcaaagccaaatgagcaaggggaagagtgggaggtgagggcaggcgtcaggagaggagcgagcaagagtcccaggctctgggcctgagagcctgggtgaactgtggcatcaataactgatgtgacagaggagggggaggtgggctgtggtggggataaagttttctactgggggcatatcgagtttgagatgtcacagagacagccaactcaagtgtcaagttgggctttcatggggaggtcaggacaggagctacactttcaggaggtgggccttgtagatgacatctaaagcttgagcctggggctggctgccgtggctcacacctgtaaccccagcactttgggaggccgaggtgggcggatcacccgaggtcaggagtttgagaccagcctgaccaacatggagaaacccccacctctactaaaaatagaaaaattagctgggcatggtggcacgcatcggtggtcccaggtactcaggaggctgaggcagtcaaatctcttgaacccaggaggtggagattgtagtgagctgagatcgcgccactgcagtccagcctgggtgacagagcaagactccatctagaaggaaggaaggaaggaaggaaggagggagggagggaagggagggagggaggagggagggagaagaaagcttgagcctggatgaggtcacctggggagagaagagaaaggctctgggaccagagcttgaggtttgctaacatttagagagactcgggaaggactgcccacttagagcttctgagatgttaaatactgcaggactggggtcccaggcagaagcaacaggatgatggttggtgtttactgagcatgtgccatggggcaggctccatgccatgttccttacattcattgtcccacaggctaattcccccagcctccttattggtattgttaatatccccattttccagtgtggaccctgaaactgagaggttaaaaataataacagtaaatactcactttgtacttactgtatgccaggccccatcctacctatgtgatatattaattcatttaatccttgcaacaactctatgaggtaggtaccattattattttccctttacatatcagaaaactgaggctcagaggttaaataactggcactagtctagctcgtcaaggggcacagccgggagtctagcatctgtgcaatctcctaatcatttctgagactgcgtgtctaagggccctcagacttcgtccttggggtaaaggtatcaatccgcaggtctgcctctgtgttggggttcagcctgtgtgtctaaggctggggctgtacatctggcagttagactttgttcacactatgtccttaagtcagactgatttttaggtatcacagcatcgaattgacatttggagtctggcacactctgtgctaagccagtgacatcatggtgttgtcagggagtacagggtgtttcttgcactagtcacaggtctgcctttctgtagaaggtgggatctgagctccattaggattatccaggtgatccccctacccctagcccaggggcccccacatgagtatgaatgggagctgggggaagcaggttgagaggggagatgttaaatacaggcttcagagagccaccctgcttccatttctgaagtagctccttgtctgtagagaacccttcattaaccagggcctggctgaccagtgtcctctggaaacaccctgtctggacatctgaggagttcattttctcattctccagcaaacacataatgttctctctttaaagcacaagttatcacccgtggatggatttgtccttttctaaggaacaaagactaactccctccattccccttgttggagttatctccccttgaaaggacactccacagagccagaaattctagaacagggaaaagtggaggggacgtgcctgtgaactgcagggacagaaggaaatgggtattgggagaatggccagccctccaaggggctgatgtctggcctgggtatggagtcccacagaaaggggacctgtgatgcagcttacattgtcccgtgagggaaccatgatcctggaacccagatgaggccaaggaaatgttctctgaaaaagtcatatttgagctgagaactgaaggaactaactgggagaagggaggaaagagtgcttcaggcagaggaaacagcatgtgcaaaggccccaaggcagaaggaacaaaacacattagaaaattcagaagaagaagagtggcgtgggtgcaaagtggaggggagctggactttgggttttgtttgcttgtgcccaggctggagtgcagtggcaccaccttgggtcactacaacctccgcttcctgggttcaagcggattcttgtgcctcagcctgctgagtagctgggaatacaggcgtgtaccaccacactcagataattttttgtatttttagaagagttgggatttcaccctgttgaccatgctggtcttgaactcctggccttaagtgatcaggtctcaacttcccaaagtgttgggattacagccgtgagccaccgcacccacctggaaggtcataccacagatgtttgcctttatcccaacagcaatgggaagttgtgtgtgtgtgtgtgtgtgtgtgtgtgtgtgtgtgtgtgtgtggtttaacatgtttaacataaaatttatcatcttaactgtttttaagtatagtgttctgtggcattaagtatattcacagccgggcatggtggctcatgcctgtaatcccagcaccttggcaggccaaggcaggtgaattgcttgagctcagaagttcgagaccagcctggccaacatgccaaaaccccgtctctacaaaaaacataaaaattagctgggcgtggtaatgtacacctgtagttccagctacttgggaggctgaggtgggagtatcatgggaggctgaggagagaggatcagttgagcctggaaagtggaggctacagtgagccaagattgtgccactgcactccagccaagattgtgccactgcactccagcctggacaacagagtgagaccctgtctcaaaaaaagaaaaaaaaagtatattcacagtgctgtgtagccatcaccactatccatctccagaactttttcatcttcccaggttgaaactctgtactcattaaatgataactccccatttctccctccttacagcccctgacgaccaccattctactttctatctatgaatttgagcactctaggtacctcatctaagcggcatcatgcactgtctttttttttttttttttttttgagatggagtcttgctctgttgcccaggttggagtgcagtggtgcaatctcggctcaccgcaacctctgcttctctggttcaagcgattctcctgcctcagcctcctgagtaactgggactataggtacctgccaccacgcctggctaatttttgtatttttagtagagacggggtttcaccatattggctaggctggtctcaaactcctgatcttgtgatctgcccacctcggcctcccaaagtgctcggattacaggcgagagccaccttgcctggcctatttgtctttttatgacttgcttatttcactgagcataatgtcctcaaggttcatccatgttgtagcatgtattgaaatttccttcctttttaaggctaatattctactgtatggatatgccacattttgtttatctattcgtctgtcagtgggttgcttccacctcttgactcttgtaaatagcactgctatgaacatgggtgcattgaggggttttcgacataatcataataattgctttatggagaccagcttggaggagaacaagatggggaggaagtgtggaaaccaatgagaaggctctcagggtatagcgggaatacagaggacgcatgatgatgcctggacttaggtggtaccacagggatggagagaagtagatagagtcaagctatttaggacgtgaaatagacagcatttgttaatgggagaggtgtggggcgagggagaagaatagagggagaaggaggagtaatgggagctcaccagcagcccccatgttatgcctctttccttccttttccctcttctctcatcaggcattcagcttttgctgagtacttctgtgtctgacaacaggctgagcactcagcactgcaggacaggactatgcaaaaaacctctgggcctagtcctgggtgcactgctaattccctgtgtgaccttgcacaagacatccaagctctctgagcctcggattccccacctgggcaggaagagtaagtccctgcctaagtcatagggttgtaatgaagagcaaagcagaccatatctgttaagtgttagggacaagacaagcatgaggcatattttcaagtctcggctcctgtaggcagctctcactaagggctaaagggcttctgatgcctgggatagaatctgtccggcagagtggagtggaggcagggggacagccttcagctgtggaattcctccagtcctagagaccagcctgagctgggggacattattccagtcctgaggcatgagagcagaaggccgatgcttctgccctccatcctaatgtcctcctgcagggacccaaggtggatggcatcgatccccccgggtgagctcagccctgggcgcatggtggggcccaacatctcaacctgtttcctaaccctgagccaggcaggacagatcccagatttgtgcccaagagatgctctggcatccatgcccaggcccacatagggatagagggcagggtgaaagtctctctccctcactcgggtcctctggagaggggctctgtgtcatgaagctgaccttatccgcatctggtctaggagggaggagggaaggagctgccagtgctaaaatctcccccaccctcaaagggggacttcacaggttattgctggttttggttgttggaagctgacagtgatttattggcagattgaagtgagtgtgtgtgcgagaatttaggatagaatctactgatagcttctgaggtttaccttccccaggtcttaaatctggagataataaaaatataacagctaatgtccaaagagcacccgctgcgtgtgaggctcactgcactaaatgctttccatatgtttctcacaagaaccttctaggtagcactattatgattcccacttaatggatgaggaaactaagctctagaaggctaagtgactaatccaaggtcacacagctattatgtcacaggctctgagcccaggtgtatctggctgcggagccaccaccactaacccctgtataacgctgcctcacagaactgtggctggctctttccgtatcccccatgcccctgctccatcatcatgctgtggtgggctctgaactgtgaggacagggatccaggctttcaccctctctctgtccctagctgccagtgcacttgggcaaggtcacatcctatttctgggcctcagtttcctcatctgtaaaatgaaaggctggattgaatgacctttaagatttccctcacttggaaattccacaagtaagtcattatagcatggagcttgcatgcatgggctccagcgtcaggccagcccagctctgccagttaatgggtgtgtggccttggatctgttacctaacctttctgagcctcatttcctttgtctgagaaattgggggtgacggcagtgtactttctttgaaaagttatggtgaggaatagataagatcatgtgtttaaagtgcttacttggcacagtgcctgtaacttagttaaattcaataaataaatttcccattcttcccatgatcatttatttttaagggacatttgtctgaccagtttgatttatgagattattggtgtttttcatgaatgttaagacgtacgtgcgtcatcttagagtcatgtactctgatatattcacacgtgcacatccacttactcggaaatgtacacacccaggcacgcttattctgtctccttctctgccacatacttgcacacattatgtgagtgtacacacatgatgcacacacgtctctgcgatcttccatctctcctcggcagccctgctggtgtattggaccctggccttcatcaccaagaccatcaagtttgtcaagttcttggaccacgccatcggcttctcgcagctacgcttctgcctcacagggctgctggtgatcctctatgggatgctgctcctcgtggaggtcaatgtcatcagggtgagggtaagcaggccacctgggccagggtggggtgggaagcagaggctctggcctctgtcctgccctgggttcaggcccccaccctgcttctcagccaaactgagaagggatcagcttgttttacccgcccgtgtaaaggggagtggggccgtggcggaaatttcaggatagacactgcatctggcccacgtgtgctctaccccagggtcccagagggagaggggggtgatgggtgtgttcgctgaggttggcggatgactttccgtagaaagggaagataagcatcaggcactggcctctcctactttctttcttcgggggtgggggactttgctttaatgtattcatatcgtcacgctggtaaatgaatgagtaagtgttttgttttcctttctgtttgctcccgcctccctctctcttcctcaccccagactccaaccttccccttcccctgcccctacctccccaggcagcccagactaatgaactcgtttgtctttcccatgctttgtttttattagtataataccatatgtgtctgtctaaataaatacctattcaggttttttcctctcaacacaagtgaatatgtaggtttcccccacggtatttatcttgtaagaatgggatcatattatgcagttttctgcactgtgcttttctcacccaacaaatatctcttgggactccctccaagccatctgatatggctaattccgttttcttaatggctgcataatattccatcgtatggatgagccataatgtgttcagctatttctctatggatgggcatttactttgttgccaagttcttgccttcatgaataatggtgtgttgaacatacttatatatttatgtattgctgcttttatttctatgggagagagtccaaggaatggcgttgctgggtcaaagggtctgtgtattttaaattttgatcagtgttacatattgccttccagaaagactgtaatctgccagcaatgagtgagaaaaccctttccctgccttccaaccagcagtgagggctacagccctttcgaacttggactgcctgcatttctctgactcttctgcttttagttggtgatctgcagggcacaaagctccttatgtgtccccccatccagtgaccctcacaggaaccctgtgatgcaagcaccatcccctttatagatgaggaaacattttagatgaggcttgtccaaaaacaccttgctagtaagtggaggaggcaggattcaaaaccaggtctgcatgacttggagttctgtgaactgtatatgaaacatggtggtatccttagatctgtggagaagatagcatatgagagattcctgctcctccccaacccaacctaaacccaacccagcctagccatggggggttcaaagtcgacctcaatgagcagttacaaagtcaggatgccctgacattggtggccaagaagtgttggggaatccttttcctggtaataattacaggcgaaagatggccccatctgttagagatcaagtgtggaatatcacaaccccagatccttgctggggcaaggtagggagtggtgagaagttggacttacccatcccccatggcccatgtgccccacagagatacatcttcttcaagacaccgagggaggtgaagcctcccgaggacctgcaagacctgggggtacgcttcctgcagcccttcgtgaatctgctgtccaaaggcacctactggtggatgaacgccttcatcaagactgcccacaagaagcccatcgacttgcgagccatcgggaagctgcccatcgccatgagggccctcaccaactaccaacggctctgcgaggcctttgacgcccaggtggtcagtgggggcacagccacaccatctattcactgccttctggtttagggtcacagagagggacctcaaagggcattaggtcaaaatcctggtgggacaagaggggaaactgaggctggtgaggggaagaagcttgccttaagtcacacagtgaaccagggacaggtgcagggctgaggattcataggacaggcacagttggaatggcccttaccgtttaggtcgtctagtccaaagtccttatccagatggggaaactgaggctctgagaagggaagtgaccccactggactctcacatccctgtgctctttcctctgcagcttactgactataaaggttggagtgttcacttgatttggagcaggggtgttagtggcctgatccttatggtaactctatgagttgagccagacaggaatctccccatatcactgaggagcaaattgaggccctgagaaaggctgtgacctgcccagagctggccacagctggcaggcggcagaggcagtctcctggctcccagtccagtgctccttcacttcctctgccctcgcaccagggcagttgctgaggcagacacggtggcaggtggtaatgagtgagtgtggcacatggccacctcctcattccagtgctgtgctcatcacatagtccctgaccagctgtgtgaccttgagcaatcatctggccttagtttccccatctagaccatgttggtgttgatagggccctcccaactgtgcacttgctgattccatgatctcttcctggagttcacctatttgcagaggatgtgaccactgggtttccccagacaacaggagctaggggcatcctgggaggctaggcccagccgtgaattagccctcaggcactctgacctggccatggtctctctgggcagcggaaggacattcagggcactcaaggtgcccgggccatctggcaggcactcagccatgccttcgggaggcgcctggtcctcagcagcactttccgcatcttggccgacctgctgggcttcgccgggccactgtgcatctttgggatcgtggaccaccttgggaaggagaacgacgtcttccagcccaaggtaggcagccccaggggtagggtaaggcaccctctagatggttttcagttgtttctgagagtgcaacaggccaatgtgtgtgagccatggccacactggagtggctcctcacacatgcgcaaagcccatagcagtatccccaccacagaatactctacatctggtcaacagaaatgccagagggcgagcctatgccccaagggtatcctactctcctctcaccgtcactaccatagtacctctcccggtagttaggtcagtccgaaaactgcaggaagtgcttttgtttgtccagtgtctagagcttctgtgacttggatttgttggctttcagttcatgtcatcttagtaaactctttaaaagttttcaagatctgtcttcttcagtcctgtaaaggctggcacttgagctttctgcaggggcatcttgggagctactgtcagaggagagagaagtgggaaaccctcacgagtggagctttgtctctccccactccaaatttcattcaaagctgcccgtagttttattaatatgttggacttttccattaaaatttcttttttaagaaaagtttccatggcttaaaaaacactggagacttattagactagattatatccaatggccttggcagttgtaacgattctgcaaactgaaatttgttggagctagaaaacctttccccggggttatttgccctgcgtggggccgtagcatccacttcgggggctgggcagactgtgctctgttgtctgtttccttgcagccgtttaggtttaaatggccacaaaatgaaaactttttcacccctaataagtttcagagttttagtttccaagtgaggatgtcattataacattttaaccacagacagtctgaaaataatgcagagaatggggaattagggtttttaataatttatgacaccctttgcgtaacatttgttcatctcatgagctccaaaatcgcagccagcagttaatcctcaggaggtttatgttcatttttctggagacataattagtcagctgaacagttttggccacagatatgagatacgttgagtctgatttatgcagcaaactttcattgaacactgctgtgtgccaggcctgggttgggctgtgggaatatgaaagcaatagttatgatgaggatgattaacaatattaacagccacttactgaccacataatacatacctggctgtgtgcaggagttatccatgtgttatttaatccctaaaactatcctttggcgtgagtatattttgcaacatctttactgtggtatacctcaaatactgtacagtttatgagatgataggtattcttatccccattttacagatgagaaagttgaggctcagaaagtttaagtaattttccccagggtctctcagctagttaataacagaggcagaatttgaacacaagactcactccacagtctgggcatttacagccaggaagctaaattgactattattatcaagccatcacctctggctccaaggattatgaaatccaacagtgaggagagaaatcaaaataaaatacttttatgctatgtgttacatgtgactcttaggaggaatattcagggaattgtgggaaaagatagtgattaacttagccagtggtcatgaacagcttcatagaggaggggatgtttgaaaggggtcttgacggatgagtaggaatttgccaggctgccatgggaagatttcttgctcaaccaagaatgcaaggaccacttttgcttatttaaactttgatggcttttgaagccatatctggctttttgagcctctctactttacctggcccataaaagagaggggaagcggctgcttctcttgtctacaggagtgtcacctttggctctagcctgaccataggctaccccagaatacccccattggcgatcctgaagcagcatggagccagttgttaatatcagggggaaatggcacaggccagagcccttatcagagtgtccacaccacgctcttcttcctgtgtttcccaaaacccttgtgggattctgctaaggagagagctctgaggcaggacgtgccaaagagatggcgaaagcacttagaattttagttcatctgaacgttatcattgccgtttttttctctttgtttatacacaaaccctggggtttattaccgtctcattggaatgctcttgtcccagttacttagcacacaaatccctgagacagatggccctgcctcagtggcagtgggccttatcagatttaatattttttccctgcagcccaaacacaatcagaaaatttccgacacagaaacaagagttgaaagtaaatatagtctccagtgtccgcaacaaagaactctccatcatgtggttgcctgggatgtggcttaattctcatgtgggcttctgagctcagaaaatgggggaaagggatcatttactgagatcatttggttcatctcccagcccccaagccattctaatccagagagaaccgagtgctattctggtctttatgaatgacaaagaaggaagctccctagctacatgttgcagtgtttcacagtctgggagaggaagccgttttttctgcccagcctgaatccatcctgcagcagttggcacagcgaggcacctgtggtttattcatcatcactcttccttcctaagatactcagagttggcaagaaacatgtcatccttggtatccgcaaggacgaacatttctgatgtcctctttagttactgaaagtgtctgtgacttgccagatctttgatgctcctgtcaccccgctgccactccccagggaaagctgggacccaggttgggctctgcctatgatctatagctctttccagcctcctctccaacccaacccctactcccaatctgtcacctcccatggatgccactgatctggctgaaggacaagagaattagattcataatgagctgctggtgtctgaaacctgccagcactgccctgggctatcagttgagccaaaggaagaaggaacagtctgggtttgatcgaagggctaaagcttcaaacagcctctaagtctcagtaggaaaatgtgtaggtttgggagggtgtatgtgtttccgaatgagttcccctaagaactgcttatggttctatatgtgtgttctgtttgtccctgtgtcttttggtgtgtctttttctgcgtgtgtgtgtgcatgtgtgtgtgtctatgcccccgtttggattgccatatttgtggctatcattatgagtgacttaatgagtgtatatgcattggtgtttctgtgactttgtggttttgatgcatgggctggcctcttcataaccatgtccatgcagctggtctggcctagagtacctgccttcaattcactagctccttcttggccatcaagactctgctcaaatgtcacctgctccagggagccttcacctggttgaattagatgccccttatctgtgctcacataacatcctatcaaagcgccctgtttctttccctgacttgatcctctgtcccctattgcctgacctctgtgtgcccagcactcagcccactgcctgacacccaggagatgcacgggaaatggttctgcaaagaaggaataatgcagcaattactatatattgagtgcttacacttactgttttttcacatgcactgttacattgacttctcataacaactctctgaagtcccttcatagcctcaccttacagatgaggaaactgaagctaagagaggttgaggaacttacctaaggacacagtggctaatatatgatgagtcaggacctctaagtccaggctcttaaccaccgtgtcaaacagtcttgtatgaatgggtaggtgtgttggtctctgggtggccaaagataattttattctttacccagggcctcccggggctgggacctacggacaactcaccttttgacacctgccaaaataggaaacaagagtccaagtgatcccctctcctttaagcaccagagaacatgtgaaggggacctttccaatcatacctctggcctggcagagacaatggggctccaaactgtagagtcgggagtgctgggttttagtcctacctctgcagctaactcatttattctcctcagcagtcacattctgcaagcctcaaatgcaaaatgtgtaataacttctgtagaaagtacatgggggcatgaagatcattggcttgattgcttttaaaaaatcggtattgagcactactggggaaatccctggaaacaaacacaattcttccctgagagcttgtgaaaatgcaagactagggcctatgattttccaaagcattttcttccaccaagtgtcaggttgtaggtccttggtcttttctctcttgccttggtacctgcagggtgctgaccagtgctatcatatcccctccccgtttcctaggaccctcttctcggtagactccaacagggcctgccttccttgggcagcatggcaggcctcttggctagtctagtacccacttcttttttttttttttttttttttggatggagcctcactctgtctcccaggctggagtgcactggcgcaatcttagctcactgcaacctctgcctcctgggttcaagcaattctcctggcccagcctcccaagtagctgggattacaggcatgcatcaccatgtccagctatttttttgtatttttagtagaaacagggtttcagcatgttggccaggctggtctcaaactcccgacctcaggtgatctgcctacttcagcctcccaaaatgctggaattacaggcatgacccaccacgcctagtcaggtacccacttcttaactgaaacttagctattccaggttctatcccttttaaaccaactctttgaagagaggtctaataatgacccaatgacttatagctgcagtgagatttttattttaacaggtcacaaaattctcaatccacaaaagtagatttctgaccctaggttattttgttgggggcggagagaggaagtcaaaggttttgcagcctttagagctgcaaaaccagaatttgttgttttgttaaaaatgcacaaataccgacgagtatatttaagtaacacccatagtctaacgaacaaacatgatcagttggcttttccagccctcattctccagcctgtgtgttttctgctcattgtaacacagcgtgtgtgtggcattccatgtttctccagagctttcatgagaatcagtggtcttggatgcatagtgttcccatgagtaccttaattacctaaccattccctgtggttggaaatttatatgggtttttgcattctccttctgctctgaccccaaaataaatgtctgtgttcatacagctattaccttatgtgaaattattttctttgggataaattctcatgatgtgttgttgctttaaaatagtggactccagtctccagagctgcgtctctgcagaggacagtgggacagaagaatcccagggcatgttaaaaaggaccgggtcttcctaaacccacatgcctatatttctgacccagtaccagccaggggggcaagtttccatcccccacaagtcacaaacctgtaactgacactaggatgcttaaggtcaaaggcctggacgaggcctagacagtgggtctggggtagtgtttttgacatcactcaggttcatgttcacatgttgtccccttaccagcatgtgaccttgggccagccactaaccctactgaaactcctttttttcatgtatgaaatggggctaataatggtaccctcctcattagggtattgtgaggatagagttttgcacctgataaatattgtctcctgccccttcctcccctggaaattcaggtctctccctgcagcctaattttaaggcccatttttctgcttccagcccacccctgcccttctaccttcgacctcctccctctgcctctccctctggtgcactggcaaatgggacagagagcctcggtagggccttcctcttagagtcttgcacgcatccctcagtggtctccctgtggctgcttcctgctgccaccaacagatacagacccctgtcgcacagatcatggtagagacagtggtgagcaggaccagacagctccagggagcagtgagggctggcttagagaacctctgttaaactgagaggccaccatcaggaagctctgatccaagatccaggaatccctgactctagggaaaggcctccaatgagagcctgggccctctctgcctgattctgattgtggatgtgccctcaaactccttctcatcactttgttccatccctctttaccctgcagcagctcccacaccctgccaaacaggatgcacagtccagggcagtgtctgagaaagagcagagatctgtcttcatggaaatattgatgtggctctgctggggagcaatggatttatcaagatcaaagttttcctgggagttattgatgcttaatttggaaatagacacactgttgatccctggtatctttagcaacaaagttaaaatgtttgtttttcttcactggttgccatctgagatcttgccggaagtacacaagagaaccttaaatttaacaggaggccctgggagcccatgaggctggcgggcttgggtctgaaatcttttcagtctcttgtaagtgatgagctctcattctctcctgagagctctacggtgccatgttttccactggccttttctgctcagtaattgctacattacaggctgttggtaagttcggaacaagggagctgctgattccatttctgtagcagagaacatgcaccgtgagacttgttgtaccagttcaggttttaggtgctctatttattcttgccccattcagaatgctctcccctgggtctgtggccacaatgctaagagtcatatttatgggcctgcagttgtaattgggccccattctgttcccccaagtggaaagatgaacagggtgtaagcaaccttccctgtagttagaaaaacgtttagttggatttatcagtctgatttttcactcataaacaattgcacaagcctttgcaagcccagagggtcttgtaataatgatggccgtggtccattatggcacagtgatgtgttctacggtggtcattttgctggcaatgacagtcacctctgaacttctctttccaacagacacaatttctcggggtttactttgtctcatcccaagagttccttgccaatgcctacgtcttagctgtgcttctgttccttgccctcctactgcaaaggacatttctgcaagcatcctactatgtggccattgaaactggaattaacttgagaggagcaatacaggtacttggatgattattttttcactttgccataagaaccattattaggaataatgtccatgagtgttattcatcctcatggacactcaagaataattctgctgtaaatttattttttgttgcccattaacgatgttttaaaacagtaaccattgacaaggcagtgtgggatagtggaaaatatcttgggctgaacttgggagacagtgtagctctggctctggttctgccttggactgggtctgaaaatccagctgctcagcccttggcttgaaagtggtagacgtcactaattgatcacagcactctttctgaccaagggtaaatgcaaccttggaatcctctctaagtggctgttccagagttctgctaccagacagtcttctttgggtgtgaaaaaaggaatgtgcttgacatacaaggtctagatagcctctaagacagggtcccctctaagatggggtattggtccatggcctgttaggaactgagccacacatcaggaggtaagcagtgggagcaagcattactacctgagctctgcctcctgtcagatcagcggctacattagactctcataggagtgcgaaccctattgtgaactgtgcaggcaagggtctaggttgtgtgttccttatgagaatctaatgcctgatgatctgaagtggaacagtttcatcctgaaaccatccctctcccccaggtccatggaaaaattgtcttccacgaaaccagtccctggtgccaaaaaggttgaggaccactgctctaagttctatttgaacccttaagtcttgctcactaatgagagtgacctatttggtctgttgggtcacttaagtctaggctcttggtcctgccttctgtgatttccttcttagagtttctggaaagatgatcaaagccagggagtgttcagggcccctctgaagaaggtgatgatgagagttgtccaagtcccagggtcttcactaggattttggttcagctatcagactagagagacatcctgattgagagtagtttaaatgggatagaagtttgtttattcttcagatagagtcagggctgacacaggagctactcaatgatcagagacctggcttcttctgtcatgttgctctgccagccttcttttgtgacttttgtctccatagccatggtgggtattgaaactgccactatatttacatttaaactagccagaagaagggacaagaggagggaacgcattttccttttaaaatggtaatacctgatttgcacataccctctcgcatcccattggtgagaaagtggccaaatggccgtatctagagagtctagaaagagcttggtctttattcttgacagctatatatgcactgctagaaattctctgtgcaaagaggagaatgggcattgggaataactagatgcagctatgcctagtgatgtccatgaagttgtggtaaaatcctgaagctaccttgttctttggaaatgttcctcagaatcattaacattagtcatgtgggagacaggagaagaagctctgcagaaaagggaccgagaggacaaggatatagcttgggctggggacaatgtcagagtccaaactctggctatcttggaatagtctgtgtgaacggtgccctcccaagttgtgcagtgcacaacctgtgcagctatatatggcaaccctgcccatccccagtggtttctcactgggaaagcagagtatttcctcagggatgtcattatgtgacaatagtggaaaaagcccaggaaaatctaagaccttctaagactcatgggggcccagagctgggaggaaccaagctgttgctcagttcagaaaacttctctagaaatcccagcctctcctcacacccctccagtgacaggcagacttgcaccaccacaagcaacagccacttttgtggttgggcagttttgtaattaaatatactaatgtgtgtatgtcataaattacattttccaattatgccaaaagagccaaaaatggttttttaatggttagcatataatcgtttttatcaaattgcttgaatctttcatgttaataagagagattcattactatgccacaaaaagcaaatactggcattaattatagaaacaaattaggggggtggagcgcaatggctcatgactgtaatcccagcgctttgggaggctgaggcgggtggatcacaaggtcagaagtttgagaccagcctgaccaacatagtgaaaccccatctctactaaaaatacaaaaattagccaggcatgttggcgtgcacctgtagtcccagctactcaggaggctgaggcaggagaatcgcttgaacccagcaggtggaggttgcagtgagctgagatcgtgccactatactccagcttgggcgacagagtgagacttcatctcaaaaaaaaaaaaaaaaaaaaagtggctcatgcctgtaatcccagcactttgggaggccaaggcgggtggatcacaaggtcaggagatcgagaccatcctggctaacatggtgaaaccccgtctctactaaaaatacaaaaaaaaattagccaggcatggtggcgggtgcctgtagtcccagctactcgggaggctgaggcaggagaatggcgtgaacccaggaggaggagcttgcagtgagccgagatggcaccaccgcactccagcctgggcgacacagcaagactctgaaaaaaaaaaaaaggaaagaaagaaggaaaggaaaggaaagaaaggaaaggaaaggaaggaaagaaagaaagaaaggaaagagagagagagaaagaaagaaagaaagaaagaaagaaagaaagaaagaaagaaagaaagaaagaaagaaagaaagagaaagaaagaaagaaaaagaaaagaaaggagttagggagaaaaaaaccctttctttctttcttttggagatttccggaaaatgtacccttacggatgagagcctgtgtcttcatgggttagagaataaccacgctttgtgcataaaaagttattaagcacaattcctgaattatacataattactagctgtcagtcagttgtgcatttctgtgtatgctggtcttcacttaataagactttatttcacagatcacttggtgtccctacttcactgaaactaggtgattatcttttgaagtctcatttcacataacctaggaggtatatagatttctttaaaaatgtcattgccattattttaaaccttacccatggtatatataaacttacagaaagacagaataggttcattattttaaaccttgcccatggtgtatattagctcacagaaagacatagaataggttcctgccttaagaaaacctgacccacaaaaaagcctgggtttacacaaaagaggaattaagggcggggagcccaccttacaacagaatgaataatagaattttatccaagagcaggcatcctgaggacatttaagacccggatgcatttttccttgttcaagagcacacatccaaaaattgcagtctttctgcgagtcatgatcactctgcacataaagcgtttaggttcagagctcggggaggccattaccatggctgctctctgtctgccctgtgagggtccttggggtggctgcactctggggatggtgctggggctgactgactcacgcggtcgtgtaacacatcagaccttccaaagtcgaacccttgttttgtttcaaggctcaattatgacaggacttggtctcagagcagatcccctccctaggctggagaaggccactttaaaacagatggcctgccccacttcatcatttttatggctctgatctgtgttctccactggcctctggtaaatcaagaatacaagtggacatgaagatctgctttaaaaaataaagaacagaccgggtgcggtggctcatgcctgtaatctcagcatttggaggccgaggtggatggatctcctgaggtcaggagtttgagaccagcctggccaacatggcaaaaccccatctctgctaaaaatataaaaattagctgggcatggtaggcacgtgcctataattccagctactccggaggctgaggcatgagaattgcttgaacccggaaggtggaggctgcagtgagctgagatcatgccacttcactccagcctgggaagcagagcgagactctgtctctaaataaataagtaaatgaattaaattaaataaaaataaagaaccaattaagtcctgtctacaggaaaaggccttacttgctggagaagtagcttgctgtgctggagtagactagtaagttggaacggtgatacagtaccaccttacagagctgctctagggcaccatggggactgtctgagaagcccctggcacactgtaacaggtggcatctggtgtggtgatgatgatgagaatgatgatgaatgtgaaacactctgctctcatttctagaccaagatttacaataaaattatgcacctgtccacctccaacctgtccatgggagaaatgactgctggacagatctgtaatctggttgccatcgacaccaatcagctcatgtggtttttcttcttgtgcccaaacctctgggctatgccagtacaggtactagatgggctgaggggaagggaggggggcagcaggacacacaaccagaatctgctggtccatggccagtaactaggagcacaccgtcttccactccatgcttgcctgtacctttcacacacttggctataccacaggctgtacctctgggtccctcctgtcccatactctgcaagcactgaccatctctcttaatgaccagagaaggcagtatcattaagactttaaaaatggagccaactttataaactatagaaaaatcaagccaggttcaggggctcacacctgtaatcccagcactttgggaggctgaggcaggaagattacatgagcacaggagttcaagactggcctgggcaacacagtgagaccccttctatgcagaaaaaaaaaagaagaaagaaaagaaaaatcgtacatggaatgcccacagatcttaaaagctatgttgtagcaaaatatttaattacatcaaaaagtgttagtgatgtatttttaagcaaaaagagtaagttacaaatagtatatgttgtatgcttactactaaactggaatatatgttatgtatacatttgtacagattcacacatgaaaaagaattggaaaatcacatagtgggattataagtgatttttattttctttatgtgtttctaaattctctaataagcgtgtataagatttggaaatcaacaacatgatacttttagcctaggcaacaaagtgagaccctgtctgtacaaaaaattagctggaagtggtggctcacaactatagccccagctactcagaggctgaggtgggaagattacctaaagtccaggaggcagaggttgcagtgagctacaatcacaccactgcactccagcctgggcgatagagtgacaccttgtctcaaaaacaaacaaaacctggtgttttttagccagatgtggtggtgcgcccctttagtcccagctacctgggagtctgagatggaaggattgcttgaccccaggagttcaaggctgcagtgagcaatgatcacgcccctgcacttcagcctggacaacagagagactcctgtctcttaaaaaataaaaataaaaacgttaaaacatggtatttttttaaagcaagacaacctttggtgctggctcaggaagaggtacattaccccccaataatcagaggagaatcgtcagcatgattgatctgacctcgggcttcatgtgtcccatctcccacccggagctcttccaccacagagtctgatcctgtcctatgcctgggactaaatcttcaccctggtgttcaggccagaaaccgaaatcccagacccattcccagagggcgggaaggttccaccgggagagcttgatgtagcagaaagtgacttgggtgagacaggctgattcaaatacttaacctctctgagccttggtttctttatctatgaaatggggaggctgcccaccctctggagttgctatggcaattcagttagataatgtaagtaacacagcaggcagagtggcccccagagtcttcacttcgtaaatatcagatccctctaccttgcacatgtttggtatgagtgaggtgttaccaatccagaatccattgcttcttgggataaagattccataaaccttcatctccagtgatttgtattggtcctccttacttgtaaagcttagagtttaaaaatattaaaagaaaaaaaggggagaggctcccacagggacacagctagacaagatgagatgcagggaatctgatgttcttttttatgggaacagtcatatatgccatcccccattaccacctacccatgcccagactgcccccgctccattctgccaagacagatcaatgactataaaagctacaaaagggcctggagatctcatctagtttagttaccaaccaaccttttatgcacaagactttctaagctgggtgtggtggctcatgcctgtagtctcagccactcaaaaggctgaggtaggaggatggcttgagcccaagagttcgagtccagcctgggcaacatagagagacctcatctctaacacaattttttttttgaaacatgaaaaatgaagatttctgaccatgcttctctcattagttaacactttgggctgtgagggtctgatgcagagagacacagcctgggaggatcctaacatgtacacagcattcaaaaggctacaagacactttctgttgtgtccccttgaacaagcagtttgtaagattttgttggccaggcatggtggctcgctcctgtaatcccagcactttgggaggctgaggctgatggttcacctgaggtcaggagttcgagaccagcctgaccaatatggtgaaaccccgtctctactaaaaatacaaaaattagccgggcatgatggcgtgtgcctgtagtctcagctactccggaggctgagacaggagaattgcttgagcccaggaggcggagactgtggtgagctgagatcgtgtcactgcgttccagcctgggtaacagagcgagactcggtctaaaaaaaaaaaaaaaaaagaaatcaggttttgtctactaaacctgctgcacggttaccgttactagtactcacagggtttgttgcacatgcatcgttgctaatagtgctaactaatattaacagcccttgccctatgcctggccctgtcccagcccccctcccttgtataatttaacccttgcactgggggtagagattttcatatctactgatttcttacctttgctcatttatcatggagtgtcctttggttttctgtgtttgtatatacctttaccacttatagatttgaccagcactcaagaaccagtgttactcctgggagttaatacaatcccagccccatggcaaagaaactcatgtggttaggattctgtgtgcagcctggttagccacagggcacgtaaggctttttataatattgacatgagtgcagaagccccattcccgtgtaagccctgagggctcttgtttcataatctttttttggtcacatgcacacagctttattgagatataacccactcatttaaagcatacaaatcagtgggttttagtgtcctatattcacagagctgtgcagccatcatcacaaatgtggaagttttcatttccccaaaaagaaacccgtacccattggcagtcactcctcatcttcgcccccagcccttggccaccgtttatctacacatacttttgaaaggctagtgaaactttctcagaaaaataaatgcttgctcaaacatttgggctataatttcaggggcttcatgggtgcccccctgacatttatcaagaacaccaggttaaggaatttagctataatggaggcctctgtgtttcccagtctcctgggtatcagaggcccagagagggcaggtgccttaccctgggccacgcagtgaaccagtggcagcaccatactcacacatctcctttctgcggttccccagtgacagagttctcaggaagctttttcatttattttctgagaggagggtaggccatcttgtattgatctccaactatatgccagccacaattctaggtgcttatcataaaggttcatttaatcttcacaatagtcctgcagagtggacagagtccttcagagtgggcattataatcaccattttaaagatggagaagctgaaaaccagagaggttaagtaactcacccaagactgcacagcaaaaggctggggctttgaaactcagggccacagactccaaagactatgtcctccccactatgctagatttttttcctaacctgtgaataggagacaaaatagtccttttatttctcacagttgctttgcacactcagaatccatgatttcttctgcatgagggccattcagacctgtgcagaagagagtaatggaccaaggagtcttgggagcacctaggaggaggggatgggggagcatgaggaggagccagggaacagcagcagctgcagcaccagctcccaccccagcctctgccagtctcttggaggtggtgtgggtgcagacaccggctcacaaggtgccctgttagtgagcttggggtgccatgggagccttcttgttgtcaggcccaacccaagctggctgaagaacaccctgatggcctccatttgagcacaactaatgaaggactggatgccagagataagtccaggagggtgatgctgcagggcaggccagggaagagggtacttcatctctatcatggtcctctgcccatccatgccagcatctaacacctgttaaacactgggaggcaggtggtgaaggggccacttcccagcctctaagatacctcctaagccaggaggcattctgtgattaaattacagggcctcccacttactcctttatccttgaggcggtgctggaagcttaatgccaatctggtgtagggctctgggactacaggaccaaggcaagcagtcctttctctctctctctctctttttagctaaggaagccagcacatctgttctttgagaaaaagccctgtatttagaggtgtctgcctttgaaggcaacctgagaaactgtcatcttggcgctttggggactggccatttacacttctcataaatattcagaagtaggcagtcatttacataaagctaaatgcagaaggaattctcttttcagggaatacctggcagattcattaaaaaaattaaagaaaccaagagcataagaatgaaaagcgaattctcggaccccaggctggttttttctggcatgggtgcagtaactttgcctctttgctcagttatcacttttttccaatgacagtaaccataagccctgagagccagcaaatagaacaaaaggtgctgtcacaaacattgtgcaatctcatctctgagatttccatctggaaaatagactggagagagttaaggcttcaaccagccttgcagataaatgcagttagttaccagcccagcaaccctctgcttgcatgagagcccattatgctaacctccttttgaaattgctttgtttctcctccttccctgcactccactccccaagataatttggaaacctgggcaccaaggcttgtcccactctaggggactggggaaacagggattttgccagcacctcctggcagggcaaccatcaggtcaaagggacctgacccatgaccccttcctcagatcattgtgggtgtgattctcctctactacatactcggagtcagtgccttaattggagcagctgtcatcattctactggctcctgtccagtacttcgtggccaccaagctgtctcaggcccagcggagcacactggtgagtgcccaaaggtgtgtgtgttttgtccctcttcccctccttccctcgacagcagcaggtctcctcccacacacccacactgtcattgactttgactttgactttgagtaggccacttcacctgtccaggcctcagcttctttgtctgggaaatggagtcaatgggggaggaggctgcctcccggtgaggacaggaggcgggcatggcagtgacagtattgacactcaggccttcctctcgggtgggagacggagcagaagcctctcccctctgactcggggacccctgcaggagtattccaatgagcggctgaagcagaccaacgagatgctccgcggcatcaagctgctgaagctgtacgcctgggagaacatcttccgcacgcgggtggagacgacccgcaggaaggagatgaccagcctcagggcctttgccatctatacctccatctccagtgagttcaccccacacagccagccctgggtgctgctgcgtacatgcaaggagagggtgtcagagctcgggtaagagggggtgcagggacagaagcaggaggccttgagattatccgactcagtaggggagcctcaaactggctctgatagctaagctcccagaaatcaaagtactcttcattcatttatccaacaaacatgcatggaaagcctgctatgtgctggacactgtgctggccctcaggatacagtgatgaggaagagagatgaagtttcattcctcatggaactgatatgttattgacagacagcagcaagtaagtaaatgaccacagttttgaactctcctaagaatgaagactttttagtaagtcagactgagctgtcattgccctggggaagctacaagaaagcttccatccacttggggctatgcaaaagaaaaagactagttatccttaaatatcagaagcccaggctgaaggtactcacaggtgtagggactgaatttatattaaccaagtagtttgggaaccccaagccaaggaagaagaaaaagaccaaaactggtaaaagtcctagagtcccatatacttgaaaccattttactgagaatgtaaaacttttttttctttttttgagatggagtctcgctctgtcacccaggctggagtgcagtggcaaaatctcggctcactgcaacctccacatcccaggttcaagtgattctcctgcctcagcctcccatgtagctgggactacaggcacacaccaccacacccgactaatttttgtatttttagtagagacagagtttcaccatattggccaggctagtcttgaactcctgacctcgtgatccacccgcctcagcctcccaaagtgctggaattacatgcatgagccactgtgcccagcccaaaagattttttagaaattgaaattttagttatggaaattaattcagtgaacaatggtcccctggtcagagtgagggcttacggaggtcaggtgatccatggagtcctggcccaagtttatctcacagttggtctcgtggctccgtggacccatcccatggtggttacttcccaagtgcataattgggatgtagatatttagcaaccagctgacttcacactagttccctgacctgtccagtctaagagtcattatggccaagtggaagcccctggaaagaagaaaacaaaaaagaaaccaaaacttactcagtgcacaggttacatgaatgagtatagctgaagagagaatttttgaattagaagacagatgagtggggattacacagaacgtggcaaggagagtaagttggtagaaccattttacagatgggaaattaaggccagaggggagtgtgttcctgagatccctcctgaggttagtagcatggctcggactagatcctccaaagtctcttaactcctggtctcaggctattttccacaaagagctgggggcctctgtggggtgaagaagacttaggacaccatggggcaccattatgaggccatttcctcctaggagaaaaaaaatctctgggctctgaaaggagtagaattagggtaggaaattaagagaggctaccgaccacctcctccaactaaaattggttcttttggtgccaggaagagacacacctggtgggggagggaaggtggtaatggagggggtgctggtagtgtctcccagatagacccatccaacaagtctcatggagaatgagacggtcactcaggtcatctgcgtattcttggcattcttgctgcctagagagagagtctgatggagctaggtggccaccaagctgtcccactccccaagacagtttggaaacatgggcaccaaggcatgtccctgtctaggggactggggaaatatcccatagcagtgttctcacagtatggggctggccatgaataccccaggagtccaacctccctttgtccagctagaccatggtgtcctatgcctcaggcagggaatgtggtccagtcatcagtggctgggccgtctgccatacatggtgcaagccatggcgttttatgcagaaagtcctgctagcatttgattttctcagaatggagctgtgagcatggcaggcaaccactgtttcctggattcttcaccaagacaccccaagttcctggtctctccccgttatcctcatccctgaccctgtggttctcagagcctccaaacacactcaggctaagcactccatagacaggggaaatttggaaggaacatctagggagctcagaaaagccaatgtccctagccccaggcccacttcaaccttctctctgtcagtcctgcctgcccctggaggctggttacatgaagagtaaccccctgcttgtgtatagccccccagttttgtacaggtttagagacagttcccagcagtaggaacagctgccgaggtgggagagggcttctcccgatagccgggggacttcctctcccaggaacaacagggtggggtagagcaggcttgtcgttgctgagatagagagagggaagggaaacaacaaggaaagtgggggcactgggtccccaaggttcctggcacagcaagcagtgaagttggggcagcctcaggtcatgtagtgggggcaggtgacatctgctttgactgctcctaagagatatgtactcatctcctggattccaaactgcagcctgggacatgttttcttatataaacagcatcaaaagatgtgtgagttcccaggctagcccactgaaccctacctagtgggtgctcattgtcccccagagcccccagaagacaagccgtggctttgtgatgggcctggggccaggaggacctagggatatgttgtgaagagctgagaagactctggaaaaaaggggctctggagccaagcaggagcccgcccaggactcctcacgtgtccaagtcacctagggagagaaacagagcagcccaggttggtccctggaagagagcagcggaggaggggaaaggggagagcccctggggagagctttgaaagtcaagtgctgtttgctcagtgtgtttgcctttccgaggatgtgtttttttttccctccgttagtcagcagtgggagggggagagagacgggtggtagggtgcagggtacctcctggctgcaggcatatgctttgagtgcgtgttcatttacctcctctggacttcctgccttctgttaccagggatcaagacacaggtcattaggcgtgaggtaatggggcatctcttgttctgacccctggcgccagtcttggagtcctgacgctgcagaggagccccagagtcacatttcctgttggggcccatcctgctcatatgcggcaccatcagacttctgggcaggcaagattacctgtgactctgtctgatggtctcgccatcaatatcactgagagtagctgtgtatggagtcccgaactggtacaggataaaacagggggctgaaaagggaatgaatgggcacagtttctctggcatcaaaagtcacatccagaattgatatttcctgttgagtaaaaatagaaatataagttgctcagtggatgttgagtgagccctattcatgtgccccactctgtgccaagcaccaggaaggagggaagggaaaaatgataagatgttctccccgttctccaggagtttatgctccactaagaagtcagagctaacatgcacagaacagtgtggcagcgagagcagaaccgtgtggccagctccatgcttgccgcctagcaagcgtgattgcacttcatcctcataacaacttggtgaggtgtgttgctctgttgtcccattttacagcagagaggactgactctcagtgaattgaaatgtctcagtgaggtcttccacagcaaaaggcgaagcacagagaaggaagtccatgtgggctgggagttcacccagagattcatgtaggggcaatgtgggctgtaccttgcaagatggtgggatttcaatgaggagaagacaaagtgggaggaagctggagacaaggactgtggtctcttcctttagaagtcagttcaatctttttttccttgtggaagcagcataactctaggtggttcctctgtatctgaggacaagctttgtagaggtgacaaaggggtcctaggtcctatcaggcaagcactcgatatgctgccagttcattctgtccattgtgagatacccattccagagcgcttcctctgtgccaggctctacggaggttctggatgttaaagaggaagcaggcatggccctggccctcccagtcttgtgggagattgatcatgcccatgaatagtgaccatgtggtcagagccacagggtcaattccaaatgcccctgtttctcttttgtgttactcacctgactctgggtctttcgtttcttccattcattttttttaaacaaatatttcctgcccaccttctgtgtgccaggcctggggatgcagtgggagaagcctctgtcctcctcagtggaggcgctaactcagaacaggcagtggagaaaaacaacatgacctggagacctggtgccccttccttccccagcatctttgaaattcttttggttgttgttgttttgagatggagtctcactctgttgtcaggctggagtgcagtggcgcgatctcaactcactgcaacctctgcctcccaggttcaagtaattctccctgcctcagcctcccaagtagctgggattacaggtgctctctaccatgcccagtaatattttttgtatttttagtagagacagggtttcgccatgttggccagcctggtctcaaactcctgacctcaggtgatccacctgccttggcctcccaaaatgctgggattacaagcatgagccactgtgcctggcctgaaattcttcaatatctacctgcccttctgccagttggtgcagccacagtgggctgcttatgcatatcctggcctggcttggtggggagcatggctgagggagagccggggcacccatcaattaaggaggtaaagatcagtctgactgagatgcctcctgccacacttcctcagctgccagcaactgacaccattaacctgatttccttccccctctgttgactgcactgactattggactgaatgggaaacagccccgtgcacctcaaaatgcacttcccctcctgcagatgcatcttgcaattaggcccaaactgtgagcctgcatgctcctcccctggccctgcacaggcaacaaagctgaagttaatcagaggtacaaatggctggctatgcctctctgacacgtaacttctggaacatgtatcaatgctttggaaatgaaaagctcctggtattgcaatgccaggctggtgcccataagggccagaaaacattccttgggcaaagccagggggagtgggtgatctgatcccagctcaggtttgttgatttgttgttttgtttgtttcgttttgtatggggcaagggttgagggtatgaaaaacttacactatcatttactaccgtagtccccagaacccagcacaccagcacaaggcctggaacagggataccttttttgaatgaataagtctttttttttttttttttttttttttttgagacagagtttcactcttgttgcccaggctggagtgcagtggcgcgatctcggctcactgcaacctccgcctcctgggttcaagcgattctcctgcctcagcctctcgagtagctaggattacaggtatgcgccaccacgcctggctaatattttggtatttttagtagagatggggtttcaccatgttggccaggctggtctcaaactcctgacctcaggtgatccacccaccttggcctcccagagtgctgggattacaggcgtgagccactgtgcccagccttgaatggataagtcttaagggatatttttggaaaggatattctaaaaaatacccatgtctctacactattgcagaagggctttcagttttgatggcagcctttcaggccagcctacacgcaactaaacttttccataacagcatcacacttacacaagaagaaggttttataatccacttgccattatttaacatagttcttcctccttaactttcaagatctgagcactataatgttcttctttttgtttttgtttttttctaaatcaaattaaggtgagtcacctcaccttgggcctgagttggacagaaatctattcttggctatattccccacccctccaccaccttggaaccttatagaactttatgtggttcaggaaaatgagggcgaggcctcagatcttcaacccatgacagctgtatgcccagctccctgccttcctgtcttacccccagctagggcacaggactgactattgtgcccagagaggtgccagagcctgtaacaaccccagacttcccaggtccagccacatccaccccagagccccaaaagatgatcttcagagagacctttaaaacacaagtagctggtcacttccatccagaccagaacccaagatggctgtgctcttgctgagacatgttggttgtcattgcctccgagcccactttagccctcagctctgtaccagaaatgctgttcctttgggaatcacagccaaagaagagatggagcagttctggaataagaacacaagttcaaactgtcccatatctccccacatcactatctacagttggtctcttcccatggcgatgtccatctgccaccgtggcactggtattgctttgagtgcaggggtctctctttttggcatgttggccctgttactccctgggaactttgagtcttatttggaatgcgtgaagtccctgtgtccggggccagcactgatccacacagctaagtttgcactcatcttccctctcatgtatcatatctggaatggggtctgacacttgatgtgggacctaggaaaaggcctgaagattccccagctataccaatctggagtggttgtcccggttcttactgtactgtcctctgtagggctggcagccatgtgaagaacagaggttcccagcatcatcttcctacacattattacattcacccatctttctgtttctcacttttatctccagcctgggaaaagttctccttatttgtttaaatccttttgtgcttttagatccccttggagcagtagagtaccttgtagaccataagagtggaaaagggtctagttttctccttgtttctaaagatggggtggctgaaaaaactccccttttttgcctacagcttgcctctctgggcctagaagtggttattctgtctccatattggcctttgatttgtgctgagggtcagcttttggctccttcttcctgagacagtggaaacaatgccagctgtgtggcttctgccctgggggctgggggtgaggctttgggtgccactgcctgtgggttgctggcttaaaggacaattctgttcattggtgagagcccaggccattaacacctacgcagtgttattgaaagaagagaggcgggggtggaggggaattagtctatcccagctagagggagataaagagggctagttagttcttggagcagctgctttgaggagaaaatgtatagcttttgacacaacaggaagatccagaaaattatcattgaacatattaaaggttatttctttttcttgcaaaacacacacacacacacacacacacacacacacacgcgaacacacgcagctgatgattctactctcccagccccagccctgaaggggacccagaactccctgcacaaaggctgtccttcaaggggagggtgaaagaagtggaaaatcacattttcattctttagcgtctccatacaacagccagaactgggcagaagctaattatatcagaagcatactccatgttgctgcatcagctttgggatgttcatttttaaatttatttatagcttgtctcattcctcaaaggagttcagggagctacaaaaataaagacaataaaattgaaaaaaattaaattaaaaaaaccatgaccagggaaaatgtgcagtagaatgaagtgtcaattatcacgttttctgactgcaaaatctcccccacggctgatgcaccatcatttactacaacagcccctcttgttggacatttccagtttatttcgtttgggatggtttgttgctgttgctgtggttgtggttttgttttattgaattttgtgttagctgcagctaataccatcttgctgatggctttgcgctgctcttgaatgattactcaggataaatttcctggagacggattataggatcagaaggtctgaacttctgtgtggctctagctacaaagcaccagattgctttccaagagcgttgtagcaatttataatccaacactcagcctattttttggctgggagtcaagccccagaatgtgaaggaggggtcttggcctggagcaggggctgagggatgggtgcacaggacccctccttattggttatttatggggatgggccaggaggagcagaatagaggcccctgccctcccagttgctccttggagtgactgaccccataggggaggggcgaggctacctcacatttagaactatgtagttggtgatggtcaaggtcctaggtctgatgggcatcctcctccctctcctcctcagccagtaatggctgcactatgtcgtatgtcctagatctgggtcccttttgctgtgggaacaccaataatacttacgctgtttcctgccggaaacggtgcaggagggctgtggcatggtagtgggccctggaaaccatctagccttcatgaggaagggcagttaaagcacaggcatgtatgatgttggtattgattaaaagcctcacgggcagagaaattcgccatctgccagggccccagccatacgagggctccagccatacatcctccaggagactgggacctctccaattgcaggagccttgccttccccatcagattaggaattccccgaggatggggacaatgtccttcccacctgcttgagaactcctaaggggcatgtactctgtctccccattgtatctggaacttcctgggagcatagctcctgtctccgtcctcagactgggaatcccctaagggcagaggccatgtccttccacccacttgggattccctgaagttggggaccacatctctgatgtacaatgctttgtatgtactgactgctgcaggattcttggagtaaatgggcagtcaacttcttggactggtattgaccatctggacttcatcagagtgtccaagactttgccattcattagacaggggccatgtgcacaggcagagccctggcctctggcttctggctcctgactcctggtccctctgctttaatttggctaatggcagaaccagactcctttctgggctgccctggaaggggatccttgaatgaaagaggatagatgggaaggtggcagctgacatggttacctcttatgccatgggggggctgctctctctggaaatttaggcctggggtcagggcactgttgagcattttacaccctaggccagaggaggggtgacctgtggagcagggctaagctagtagcccatgaggtatgatgtgtaggcagcacctggggctcacagagcctgttacccatgttatctcctctgaccttggaaagagctggggtgtatgaacaagtatttataagtttacaaaaatcatatgaggaaactgaggcacggggaaggtaaatgacatgccctaggttacacagcttataagtagcagggattctgcccttctgtcacaccaagtcccactgtcttttcttcctggagtccctgtgactgatctaaaggccacatgtttaacagaataaggaggaggcctctgttgcagcaaaccagctaccccacccgcacacagactctaagggacatcctgctttaagctgtccttagttactaatacctcagtgagaatgagtttgaaattttctcaagagccatgggagactaggaagtctctaagcttcatagagagcctggcttggggggacacaggagccaaaggcagaggaagaagtggcagctttgtgcccccagaaacacgtgctcctgacctcacagttggccacagccagccaactctcccatccttctcccaccactttcccgtggggctaacttcaccctgtccacacggagtgacttaacagtttaagccccagagtcgggggccggggtacctgggacaagagtcctgagggaaatggggtgaggaactggaagtgccacagggctagagttctgcccctagcctactggagctgtgccccacaggctggccccactggactgcgctgcctccaagccatcctgggcatctccatgtgtagctgtcacgctcctcccactaaacgcctccctgtgcttcctctgcagttttcatgaacacggccatccccattgcagctgtcctcatagtaagtggatcctttctccatctcttgggggtagggtggagggggagggcgtctgcagtgacaggctgcccagatttggcctttctgcacaggggcctcagaagacaggctccacagccagactgaaaataggatcgaaagtttatagagggtgtggcccctccccaactccagccgaacaggggcctctgcctccaggcctggaagaccggaggcttagtatttagagaaattaaactttcttttaaaaaatagctatccaaatttttaatttttaaagtgaaacatgtgtattgtagaagtgatgggaaatccagaacagaaagctcaaagagaattaaaatcacccataatcccactggtaacatttttaatgtgtttctttccagtctttttttaaggcctatgatatgtcattttctacaaaaataggaatgtgctatgcatgcagttttgcaacctgctcttttaaatttaggaatatgccacacacaattctccatgccactgaatattatgatggtggctttctaaagcaattttgataaaagctgtgtgtgagctgagccatgggggtcaagcagcatgctcctacagaaaggcctgggcccctacgagcctgcagccccctcacccagcctcccatccccatcttctgtgatggctgcagttccttaaaaagatctgcttatttcccccggggccagtgtccctgagctgtgtagagttcacagcctgtcggatacacttgggaattcacttccaatgtgatgtattgagctggttcctggcctggctcctgggggaactgtgggtaacagaggccactgagccagccaggtggctggggcaaagcactgtgcagtttcgtaatcactctgtttacgttatcccgatgaggactggggagatgagcaccccgcctgctgtctgcagagggggccgtgctgacctaacccgagatctcctccctgcttattcccagccaagactgggcaggacagggagtcttggccaggacagggagggagcagcccctgctctccagcttgaagtcctgaacttgttggggacgtttccatgagatgactgtggggatgatgaaggtgtctccaactaaaagatcctcttaggagcctgctccctgacagccctctcatttcccttccagtgctgagcgtttccagtgtgggagggacccacaccctgggccaccctggcctcacttgtgcctctgtccacagactttcgtgggccacgtcagcttcttcaaagaggccgacttctcgccctccgtggcctttgcctccctctccctcttccatatcttggtcacaccgctgttcctgctgtccagtgtggtccgatctaccgtcaaagctctagtgaggtgaggggagggtccgggcgagggcactgggcaggcaggtcctgtgtcagcctcaaggcttgctcgagtgatggccaaaccacagctgtttggtcccggaacacacccccattgctgggccttgctgtagctggtcctggttggtcagagggacattggcctgtatggtttcccagctcgccatccctgagcaaggacttgcttacatacctcccaggagaggggactcactgtcactttcacgacaacttaaaaaaaaaaaaaaaccagtgttgagccaaatgtggaatcctcctaaattctacccactggtcctaacttcaccctccagagccaccaagaatgaggccatcccgtccccacgtggctgccccatggatatcagaaggcatccactgtgtctatctttcccaggccaagtatcccctaccctttccacagcccctgagccctcacagcctcagccagtgaaacagcttcccccaagcgctgggtcctgctctgattggcccacagctcttggaggctcccacttccaggctctagagcctcatggggactctgccactgtcccagaggcattgccctcttgggaatgaaagcctgaaggtagaaggctgaggctttggctgggaaatgccctgtctggagtgagaagatgtccttgggcctctgaagtagctctgcctccttgaaagcaagagcctgtcatgcctctatggagggctggcttgtccttacccatggccagagaaccagtcagtaacaaatgtcctctgtgtcttcagccttgaggaaggtgacacccctgtctcatgggaccctggcaggtactgggaagctggaaggaaggagtagctgttggaatgaagtagctgatagagagggtagcttgcagggggagactctagcatgggttcaaagatggaatggggcataactcagcaaaattatgctctaaggagtatctgaccaggcagtagctggttaaacagggattagctcccatttccacagtcggctgtgctgactcagtttcttgaccagggtgttgtggggtctgaagatcacccctcctcccaccacccactctccagccctatgattctgtgtagaaaccacagatttaagaacgctgcacctgcctgaaaactgttgcactgatcccaaagcgttcatattttcaaacactctggatcccactgtttccaggaatggaacaccagagtagcagaggccttttcagtgaggcagctcaggctctggctgaaggtgggcgcaggacactacctgaagcttcaccccaagagatgagggccagctccactcttcccagtcaccgcctgtgggggagggaggctggacagggcatgaaggcagagcctggtggtctgcccctcccatctaggggtggcgcacagaaagggagactccaggccacagctcacttacaccccagaataaccttgccttgagggtgggatggcttgtctgccccaggcctgttggacatttagcaaaagagaagaaaggggaatacaaacaatcctgagcttcccagaaagctttcacacctccaggatgggagagaatgaactagaagagtgaagcttccagtgcttcctcaggtccacagggaaatctggacaggggagagggtaggaatagccgcctcccccgtgagtaatgacacctcctccagcaggctgttatggggatccgattacataatgctacaaaacagttaacacagtgtctggcatttagtgtatgctcacaaaatactagctattgattctttaccaatcctagtcctaactaaccttaaccctgaccaatccaacaccaaccatccttcagtctaataacccagactaactaacttcaacattaaccctaaaactaaccaatctcacctccaatccagaccccagcctattccagctgactggtcaaccctagcaaaccctggtaacaccaattacctgcccccatgcccactggtctgcccccttcagtgtgggctttgtgggactatacttcaggcctgagatcctgctcagagctctctatcaggctgcgccctctcccctcccctctgcccctggcaggggtgaggggtgtctctgtgcttcccgagcagcgtgcaaaagctaagcgagttcctgtccagtgcagagatccgtgaggagcagtgtgccccccatgagcccacacctcagggcccagccagcaagtaccaggcggtggtgagtgcccggcctccccttgctactcccagcatggtcctctaaggcccaaaacttgggcctgctgtgtcggacttctgccttttttcccaggaagaggggctcccttccctacacagctcccagcccagtgggtcctcacctccaaaccacccccagcccctcagggttgtgaaccgcaagcgtccagcccgggaggattgtcggggcctcaccggcccactgcagagcctggtccccagtgcagatggcgatgctgacaactgctgtgtccaggtgagtcctgctgccccatgcctggccacccagcaccaactcccagagggagctcagcacctggaaagccagaaagctgcatgcttagtcctctgcagaggtcaccctgcctgcctgtacggtccataggagtccagaaaccagggaccaccaagtggggggacccccagccttaggcaagggtcagcatgagaaggccagtctcccactcccctgctctggaagtgatccaggggctggaatcagtgtcttttggctttcatggaggaggggaagccagagactattcactgggaactggctgcctttctgttctctcctgggcggtgggacacgcctaatgaagatcatgggaggctacttcacgtggaccccagatggaatccccacactgtccaacatcaccattcgtatcccccgaggtatggcccagtccacccctccagcatgcccctccccatgtcccactgaataacatagagataaaaagacaaagctgcatttattgagcacctactctctgctcattcttggtgtatgccctgggtatattatagaaggggaaggctacattctagaggcttccgtgtgctgggtgggagtgaagcactaaggacagggtaaaattgccagccttaatgtcaaaccatccattgcagacagtataggtaatgcacaaaaagatcagaagtgggtagccaaggaacgcaagtggaagtgatggggtttctgagaatggacaaaggccctgaggccatgaggcaggaggattttctggcagaggcagccatgagcaaagtatggaggtgggttggaggtgggacccaggatggtgtttcttgggaccacaaggagcctgggctcatactaggagcatgggaaaggagaagcgagtgcttaggaagggtggcggggcaggaaatcagagagggggaaggacctggggagccagaggaggatgttgatttccagaaggaaaggattaaagagggagaggacttgctggggattctaggtaggaagaaagaaaacaggggccccagggttgggtgcatctgtctgtctgtctttctgggtaatggttgttcagactcccccggccccactcacatctgccaccctccctccctgcaggccagctgactatgatcgtggggcaggtgggctgcggcaagtcctcgctccttctagccgcactgggggagatgcagaaggtctcaggggctgtcttctggagcaggtaatacatgtatcctcagggcccagtggaggggaaatctccttttaaccatcctcctcagttgaggatgcacacacatttattggagggcccactctgtgttcagtgaggactcaataaatgctgctaatggatattctcatcatcatcactagtacgtattcacctcttactatgcgcaggttctttgctaagtcctttgcatgcattatttcatttaatttttatgataactaacaaggtccatactgttctcaattctcatttatagaggaaggttaaactatttgtcctaattcacacagctaataagtggcagagctggaattgaaactcagttctgtcagactctgaatcccatggttactcagatgcacggcagtaatttcccagtgtgggaaattgcaacaccaacattggtttccagcttggtcctgagctgcactgacctacacaccataagtgggtgttctgaagatccagatgtaaccaataaatgttggtttctgggcaaagatcactgtcttaattaaagagccagaaccccaggctcagtcaatcacgaatctgttatttatacccacctacttccaagaagcacttgaaactagttgatgaaagattcatgtaaaaatcaaaaccacaatgagataccatctcacacccgttagaatggtgatcgttaaaaagtcaggaaacaacaaatgctggagaggatgtggagaaataggaacgcttttacactgttggtgggagtgtaaattagttcaaccattgtggaagacagtgcggtgattcctcaaggatctagaaccagaaataccatttgacccagcaattccattactgggtatatacccaaaggattataaatcattctactataaagacacatgcagacgtatgtttattgcagcactattcacaatagcaaagacttggaaacaacccaaatgcccatcaatgatagactggataaagaaaatgtggcacatatacaccatggaatactatgcagacataaaaaaggttgagttcgtgtcctttgcagggacatggatgaagctggaaactatcattctcagcaaactcacacaggaacagaaaagcaaataccacatgttctcactcataagtgggagttgaacaatgagaacacatggacacagggaggggaacatcacacactggggcctgtctgggggtggggggcaaggggagggatagcattaggagaaatacttaatgtagatgaagggttgatgggtgcagcaaaccaccatggcatgtgtatacctatgtaacaaacctgcacgttctgcacgtatatcccagaacttgaagtataataaaaaaagatgcatgtaaaataaaaccctttaaaaaggtaagaaaataggaactgagaaatgaagagggtaaaaagatgttcagcaacctgggcagaggacaactacagccatcaacataaaacctggctctgtgccctctggtagccaagggaaaaagggatctctgggctttggagtattcatttaggaataaaagttgcagccaatcagcagaagggcaagctttccctaccaatcatttctaggggaaaattattgaaggtgtcaggtttttcataagcatgagtacagaactgagcagggagaaagactttgggcccaatgtctgaatatcaacatgcacccccgtttcctgcatttccaagatgtccctgaatggtgtatccaaaagatggcaaatttccctcctcagtggggtcgtgggctagcagatgagccccttgggtttcccatcacctcccatcagggactgtgatgtctttgggggcagaggggtctttgcctccattcgccattttatttgggagatttttcaacatagcctgactgggaaggcccaggtattcggtttgagatcatattgccttattccgactgcctctccagcctttggagggaggagcccttttctgctgtccaactgcatgcctgcagcaagaagacaagagtccccagtgcactgtgagctgaagaaagtaaccaatatttattgggtacctcctatgggccatgccctttgctaagtgcattgtcaacatgatctcatcaagcctcctactaagtttaggaggggagtgttgttaccccatttcacagaagcagaaactcaggctcagagaagttgggtgacttactagtcagtgtgtggagcagagactctgcccatgttctttccctcaaacctggtcactgctggggcccccagggcctagtcctaagggttattgtccaagccccatgtagtggtcaggctggatctgggctctcctccaaggcagggcttttccagaaggattgcagggctcagacactggagctgcccctgccttgacctgctcagcatggatgtcaaaacccactctgaacctggtccctttgccctgctttcttctcctcccccaccctcatgccctcatgtggcatcgtgcctgcctcaggagctctccttgtcctatgtagatgaagcaggcatgattggcaggggtctgctctgccctgcctcagtccccacctcttctccaagctgtgccaaccctccgggtctgactgctgcccctctctcttaggaaacctctgccccagcccagggaacacaaggagcctctccaaggcagaggaccctaagcacttcttttttttattattttttattttattttaggttctgagatacatgtgcagagtgtgcaggtttgttacatagctatacatgtgccatggtgctttgctgcacctatcaacctgtcatctttttaagccccacatgtattaggtatttgtcctaatgctctccctcctcttgcctcccaccccccgacaggctcggtatgtgatgttcccctccctgtgtccacgtgttctcattgttcaactcccacttatagtgagcacatgtggtggttggttttctgttcctgcctaagcacttattataggccaggcactgtgcaggcacctcatcatctcagtcagtctgcaccgaactctgtgcagtagatattattatatcctcatttatcagattaggaaactgaggtgaagcaagttgtccaaggccacccagctgttaaatggcagaagtgggatttgcacctaggtgctcaagtgcattggtttgccaccatgtgctcaaagagaaggggcacaagagcctcatgaagaaggcatagctagcctgacagtccaaaggccagcagccgctgtggccatgactcacacacacctgcctcctcccagaactgccacgtgggtcctcacagctctgtccttatcaacacttactctcctttacaggtagcctaggccccagctcccagctctgttcgaggctcgcagaggggcggtagtgaaggggtctcatttctccaggatcctctttgctctctcgcccggtcctggtccagcttccctttcaagcatagtgaagtgcatttgttagcttgcagccaaccctgggaaatcatgagaatttgttcccaagtcaactcattctccagcgtccacagtgacgtattcactcacccagttgagcgcctagtgtatactagaccctgtgacagcaacaggagtgcaaaggtgactaagacgtggcccctgctttttttttttttttttttttttgagacggagtctcgccctgttgcccaggctggagtgcagtggtgcgatctcagctcctcacaagctctgcctcctaggttcaagcgattctcctgcttcagcctcccaagtagctgggactacaggtgtacaccaccatgccggctaattttttgtatttttagtagagacggggtttcactatgttggccagggtaatctcgaactcctgacctcatgatccgcccgcctcagcctcccaaagtgctgggattacaggcatgagccaccacccctggccggccccgcttttaagagaggggagagaagacctgggccttagaagagctcagaggaaccacaattgactctgcagtcaaggagaggaggctcactgcggatgtggtatttgagccttgaaggatgagtgtggtttcatcaagtagaaaaggcagggatgggaaagggaggtggtccaggcaggggtgatggtgtgggcaaagccttgctgatattaaagaacatagttctgtgcacctggaacactggatgcatggggtgcattatgaaagatgggactgaagaagtgaacttggcttagatcccatgtagtaggtctgagaagtaagatttaacccaaaggttgcaaaagaaccatgcttgtgataaaggatgatggattggggaaacagagaaaaagacagacagactgtaggaagggaggtattagcaaataatcataacacagtgtgaggtgtgcattaatattcactcattccaagtattgatcaagaagagaggtaggtactgggttaggaaacagcttgggcaaatgcatggggaaatgagagatgtcaagatgcattctaatggcagcctcttgaagatcttaagttgtttttggttcactcatttcgcaaatgaattcatttagcaaaagcactatggatacagtgcttacctctaggaagtaagttttagcccaaatgctgcagaaggatcatgcttatgacaaaggatgatggactggggagagagaaaaagaaaagacagacagactccaggaaggaaggtcagtctgcagctccttatagtggctaggagaaggagtctaggcagatacgactcaattagcttcatctgctgtttgtctctcaaaatctagacatgtgcactgctctggctggcccacctatcctgggcattgagttaagtgtgggggctgtgtgttgagagtccccctccattactggcaggaactccacacctcagacattgagccccaggtctgcagggagaagacgtgcttgcaaagtgagctaaaagcaaaacagcctctgacctggcaagcattcccaagtctgcacgcctgcagccagaggagagggtgatgccaggctgctgctcagatgcttttcagccatacccaggccaagacctggtgaccaggcagccagaaggagttccaggaggcacaaggcaggaagttgggggattaggaggtgtagaatggagaatgctctggggagatgggtgctttgttggtgcaactattcgtttattcctccagtgaccacgtgagcagtatggctgcacacacaggctctgcagccaagctgcctgggttcacatttggtctctgtgctttggaaaatttcataagctttctctaccagtttcccttattacccatgagattgatgtgaggattaacctagcatgtagtaaatatcctataaatattattattcaatagtgtacttctttgccaggaacaaaattcacctgttcctctttaaatgtcctccagtctgtctcctgggaaagattcttgtgagctccctggggacagggaccatattttgtttgtctcactgtatccgtagtgctttttgctaaacgaattcacttgctaaatgaatgaaccaggaacaacttaagaccttcaagaggctgccattataatgcatcttgacatctctctcctttccacatgcctttgtccgagctgtttcctaacccagtatttcactacccctcttctccatcaatatttggaatgagcaaataccgttagtgcatacctcacatggtattataattatttgctaatgcgtctgtctcctccatgactctgagctccttgagggattattccatgttgtaccccaggtgccccatgcagatgtgtattttgtgcactgttctgtgtaggctacaaaggaaaaggcctagcacctgcccttggggagctcacccacccaggatggacagaggtgtgcagacagagctgcagggtgggcacaaagggtccatctgctgaagtcctgcagatgcagccccgagcttgtccctcacgtcagcagcctggctcctggtctcagagagaactgtgtggttcccaagcattcactttaggaagaatcacttgcccctccctggctctctgcttcaaggaactgtgacaaccttgggatttgcaaactctctctttaatccttaagaggaaaatgttttggtaaaaagtcaagattagcagatacactcgggtgaaattctttccctggaaataaagaatagagccattaatatccacagtagagtgactttaaatgcccccggggggtcagcaggaaccagggccctgaggaaaggatcagcgtggggaagaggctcccacttccctgtgaggagctgcacatgcagtctcactggagctccctgctgcaatgctgttgcctgtggtggttggtgtggatgctgcctgccaagagccctgattccccaggaagagagaaaaaggcttctctcaggacggccctggtcgcatctgcctgtacaattcctggagcctttggggagctgaagtcaggggctcaagtgcccctgggtttcctggaggaggcaggtgtggtgagacagctgacagacaggagaagggatgctctgaggaagtgactgtccagccatgggaaccagatggcccctggctgtagtcctgatgctgccacttgctagctctgtgaccttgagcaggttacttcacctctctgagacagactcactgtctggacaatgagtaaaaccctacctttcctgtctcagagatttggcaatgggacccaatgacatcaattggaaaggatgctgtgggtgaaaggtaacctttcaggacagcgacaagcctgtctgggcaggatgaatgggctgtggagccctgtatatcctagctcactctttgaacctcagtttccacttcttccctttttatttattgccggggtcttaaatgagtgttgggggtatctgattctccctctgcctgtacttttggggccaagcactgagctgaaaagacaattcctcctagttctccaagcctacaacctgccccctaaccagctgtgagctgtaatacattctccagtgtcactgtgaggtttgtgccttcacccccattttatagatcaggaaacagaggctcctccaagtaaaggagcttgcctcagatttcacagccaatgagtggaaaagcctctgggattcaaatgtcagagcccatatttttcctacttctcgcacctgttatcatatgctgcctcttcctttaacctgcagttccctcccttcacctccaccgtctcaatccttcccactctttaaggttcagttcagctatgacttcttctatgaggctctactcattttctcagatttcttcctcctccaaatttcttgtaaaaattatgttttttctctgattctaaaagaatgcacattacattagaaaagatacacaagcatacagaagataaaaaccacctaatatcccatcacccagaagcttccagtttttctttatgcatttgcatatgcatttgtgtttacttttccccaaaagttctccgatactttgtcctacttttcttttgacccttataacttcctgacttcggtacctttctgatttgccctaccagagtgtgagcccctggaaggcagcctctgcaccctgattcaggttgccacacatatgccagctcctagtgggctggagggaaggacatgcggttggggaactggaagactcatgctttcagctgtgtgcttcctccctagagtgcaggcagaggaggaatcgaatcccctcagcactcttgtaaagaccacagcaatgagtgagagatggtgcctgccagacataccattctttacttttcagcttaaaacagatacaaagtttggggaggctcactggaggaggcttggggctacactggaaagagaagaacttggattcacaccccagcttcccctcttcccagctctgtcacatttgcaaactctgagtctcagtatcctcatgtgtaaaatggggatagggtttatagggttgtaaggatgagatgatgagttgtttgcaaacaacttctcacagtgcacagtgaaggtcagcaatgagagccagccccgccctttcttctttccaaatgattaatatatctgttaccagcctccattcattatatagctctgtcatgtgctaagcaccatgggggctgaaaaagatgttcttcctgccttaaaattccactggggatgaacaaattacacgggagctgatcagagaggaaggcagtccattatgagggctaattgagcagtgcagaccatgttgcaaactgagttagggcctggagagcttactgtgtgctggggtcctcaggaatgccacagatgcatcaataaccacctctgctactctggaagtagtcacatcaggaagactccagagataagcttatctgggctgtggccacagagctggaatttgtaagctttaggtttctatgtctcatgttaccagcttgtctataaattgtaaattacagccatctgatggttagggaatatgaagtttggttaagagaatgaaatgagaccacgaagattagagaacaggaaaagaggggactggggactacatacccatcagaatcttcattcagtcctgaccctcagcaggagggggatttcatcaggctcatttccatccttgatttcgtccatcctggttctcctgacaaggggcatttatcagagttatggcatgggaaatcacaggggagtaatgtaccatggcatttaagagtatgaacgttggagtcggagctattttctccgctacttactagctgtgtgactttgggcaagttacttagcctttctctgagcctcactttctttatctgtaaagtgagggcgatcagaataaacctccttcatatggttattttgagctttataaagagacaatactggctgagcacggtggctcactgccagtaatcccagcactttaggaggccaaagctggaggatcgcttgagcccaggagttggagaccagcctgggcaacatagggaatgagactcctgtctctacaaaaaatatacaaaaattagtcaggcatggtggtacgtgcctgtaatcccatctactcaggaggctaaggcaggaggatcgcttgagcccaggaggtggaggttgcagtgagccaagatcacgccattgtactccagcctgggcaacaggagtgaaaccctgtctgagagagagagagagagagaaaatactactatggtgcttataaaagttcaataaattttagctgttgttagtattattaaagtaagatctgtatgaaaataaagcagattttttcccccaaatgttcatgtcagaagtatatatttcattggcaaggggctgcttctggaaggttgagaggtatcctgggggaggggatagagcactggcaaaattggcatcacaattcaagtcacctcactcagtgttttttaagttatcaaaatccacagtatgaaaagcatttgacattacagtccactatatttatgcatttataaacaagagaaaaaatcacgaaaaatacagtaccacgtgcagtacacactgattccatctattctttttttttctttttcctcaaatgcacttgccgcctacttattccagacccaatgattgggtccctatccacagtttggaaaacactataagaaatgattgtgtcctctcactttccctctctgggatttagttttccaactataaaatgctcctgatgcccagccagcctcaccgctgctccgagtcaatgccaggaacgctgatttagcacatgctatttggagggtacccatccaggtgctgtgggagggacagagattgagaagagtgctttctgaccccacagaggccatttggaaaccctgggaatgggtgggagggttggaggtggggattgcttctcccctaagactcagcgtgatggaaaggcaatggggtgggaactaactggtgttggtctgtcccatttgtgtcccagcagccttcctgacagcgagataggagaggaccccaggtacagccttgggactgggtcagaagtgggtctcaacaaagggaaggggtagggtgggggtggaggacttgtgggtgggtaatgctgagtatggattcagggatgtgcagcctacatattttcagagacatggggctaaggcctgcattctcaatgagggcaaaatttggttcttggggacagaaaacacttagacattgcaatgctttgtggctgtccaaagtaccaaacagatgccagtatatctgtggtgctgaaatttcatggtgaatggagtcagaaaatagactagcgattgccagggtctggtgggagagagagggaagggactgccaatgtgtatgggatttgttttggggaagataaaaatgttttggaattagatagtggagatagttgcacaacctggtgaacgtacttttagtttcagaggttttctaaacctctgatttttttttaagtgacaggaaagacagaaaaaagtatatctaaaaaggctctaggggtgatcatggaaaagaaagttaagaaatatgactgtaaggaaaggagatgggtgtccctcaggccaggcagaaaattcagtcttgttgctttatgttcatgtgcaaatctaaaaaatccaagtgatatagattaatgaggctctgagtccctcaaaaccttccctccccttacctctccaaaaaacacttgagataccctagaggtggtatgaagtcaggatgggaaggttggctcagctttgcaaataagtttaagcctctggcctttgctctccaacaccaaagaggcttcactttggtatattttctctgccctttctccctccttgtccccaactgtcagtatgtgatgacaggctcagcctctgtaatggtagtgatcatatttcttgagccaaaaatcagacctcatggcatgtgacaagtttgcatatgtggatgagaacagagtggcagaatatttgacacgggagcagcttgggcagtccagggcacatggcactgcacctgacatccctggcagatcccccacattccgtggttgtcttctgatggggccatatggggctgcagatcatgcctggagccctcgcagctccagggctgcgggttcccagccccagagtgcaggtgctggtgtcagcctgcctggcctggcctggctctgtccagagcactccttgccccagctgtttgtgcagctgtatcagcctcagacctcagcctattcattccaacctgaatgcagaggctgggtctggaggagccacattgcgggcttcatactcctgatctgacaagttttccccccagagcctgcaccaatggcacctctccccattctccctcttaactgggtcctccagggccctcctcacacacccacgtggtcaggcagcagaggcttccccaagatgggcacaccccactctccacacctctctatgcagcatttgtggctacagactgggtccaggggattgtaaaggcatgctcatgttgggttggagggagctcaggatcttcctggaggatatggttcactcccatgagagctcagtatgcctttcctcccctgctgcagcccagagcgggagacagcgaccgacttggatatcaggtactgcgtcctgggaacattgccccccagggtcaactccctccagggtgctctcaggcccaagggagccacatcaccctgctgggcagcccccagaccccagccccagtgttgggggaggccagggagggcccctgtgctccaccaggtggctcgggagctgctgctgtttctgtgcatccatttactcccttcacataagatcatttttatctgggatctctttttcttttttcttcaaaaaccacatcactcaaaatgtggcttccttggctctgcttttaaaaaaaaaaaaaaaagttcttccatttggagaattacctgctgacttcaaagtccagtggcttgagggctacccaaagagggaggaagccagaagttgagtgttcccttggtttggtcacacttttgggctcctccctgactaaggaacaacagactgcagggctggggcaggctgggtgtagggcagggaggggatgaggtcctgctgccccagtcagttgagacccagacctctcaaacctgcctgggggaaggcaaggccaccagaggccacactaagcagatttctaccaactgcacctccccatccccttgcctccatctgagccatcagcttgacaactgcctctgagaacaagcccctgagaatgccttccgcaccccctactcccgccctgctttttccaggaagagaggccccgtggcctatgcttcgcagaaaccatggctgctaaatgccactgtggaggagaacatcatctttgagagtcccttcaacaaacaacggtaaaagcctgtcggagggaggcaggatgtggaggggaggaactgtctctggccagcctgccccagttccgggcccctccatcgatcacccacacccagccatctcactccccaggtgcttacctgcactccagcctctccatatggtgcacctggagaggggccaggtgtgcctgagcattggggcaatccagctcccataggggagagggcaggaatggagggaagggagagagccccgctgccttttctctagctggtgggagggctagctagctctctctgtgagtctccattcgcctggctcctgcactattttccctccaatgataatagttagggctagcatcgactgcgctcttactacataccaggcacagtgccgagctctttgtacacggaatttcctctcatgcttacaacaacctcagtaggtagatattattgttattcccactctacagatgaagaaccaagtttcagaaaggtcccaaggccacccagccagtaagtgaccaagatgggtctcaaatccaaagctgcctaacacctaagtacatgtttgtcaccaacatactctgatgcctccatgaactctggctggcacctgcccaggctaagggctggctggggaagtatgagaggaacaggctgggcaaatatttgaccagccatcatcattactgcctaaaccaaccagcagtggttttccctgcagtgccccaagcacgggttccggctgcagcttttcccactgcacagagatcatgagcgccctttcatcacttactctgcatatttgttcccaaccaattccatccttctagtatttaacctgcccaaacgctgtgtgaagtgctgacctcagctcttttcaagctcacacggtgtttgcttgcacccaagcgggaggcctattaaagccattgctcaccctgggcatagctacccagagactaatgaccctctgcaagtgctcgggccaactctgaccaggctgaccagctgcatcccctgcctctacccacgccaggtacaagatggtcattgaagcctgctctctgcagccagacatcgacatcctgccccatggagaccagacccagattggggaacgggttagtagcagcctctgaggggttttttcaaagccaggacccccaacctaccatgccctgagacactactcaggacaatgggtaactaggaaataggagacattgaaggctgaagagttgcctgcagtaaggtcaaacatgttgttcttgatgatgtcctttgacaggttttcagtcctgcttggagggcaaggtcagcttagtgccctcccaggctggggatcttcttcatttgcaccccaggtatacactgagagcccacacagcactgtgctcagcctggggttgtattgttcctgttcatcctccagatggggtcccctccacaagcttagacgaacaggattctcctgtgactgtcctccttttgtgtgattttaatccctgctgcctctgtctttgtttgtactggtcagatggtccctagcgcctacacaatgaatctttaaagacttggggctcatgctgccctcttctgaatgaattcagtaaacacgtgcaagttccttctctatgcaaggtgagaagcaggcaaagaagtggatagagccaggcctccatcccaaagagctcatagtccagtagggtacaggacagtgtctcctgaatggctgagggcatgatgtgttcctcctctttggtgacagggcatcaacctgtctggtggtcaacgccagcgaatcagtgtggcccgagccctctaccagcacgccaacgttgtcttcttggtgagtgcaagttcccttggggtcctggtctctggctgcctcccaggcctaactgcccacctccacctccccgcaaccccaccatcatccaacaatctccctctccaggagtaaatccctcctgccagagatattgccttatcatcctagtgatagggaaactgaggcaggcaaggatagcacaaatgacccattgcagacttcagatggagctctgcagtagccaatgaggagaggcaagctgtagttataggctgcctgtctgtgggacagcccaacccctcaacacttatgcagcccgactataagaatggctgataacagaatgtgtgctgccacttcccatcttatgcccagtgcagacattgctaattgttcacagcattatttcccatggaacttaactcatcctcagaatccttctcaacacagcactccaggtaaccactagccatcaaacatgagataaaactaggccaggcgcggtggctcacgcctgttattccagcactttgggaggccgaggcaggcggatcacgaggtcgggagatcgagaccatcctggccaacacggtgaaaccccgtctctactaaaaatacaaaaaattagctgggtgcggtggcgggcgcctgtagtcccagctactccggaggctgaggcaggagaatggcgtgaacccgggaggcggagcttgcagcgagccgagatcgcaccactgcactccagcctggggacaaaccgagactttgtctcaaaaaaaaaaaaaaaaaaaagaacgtattcgcaatccttacactacttcatgtcaagttctgttgtgtcaggtgccttgactgacactgaagaattctaagaaccagtccttggcctcaaagatttagaatctgattagggagacagagctcacccagttcaagaggcccagcccggttcaaatccaaactgtgcggcataaactatgagggggccttgtccagggagacaactgtgagggctggagtaatcagggagggcttcctggaggagagcctcaaagggagagtcaattaaacagaaggaaagagggaggccatttgcacagtgagttggaagaaggaagctcaagtctctgattccagctttattccctcccctctccctacaccacacgcacaagcactcctttactaaagacacttcacagtgggaagattcagtctccgttaccgtctgacacacacacagcgttttacaaagcatgggtgcattcgcgatctctcatgagatttaaacaaccctgctagagaaaagtgaagtggacattttatttcagtaaacgtttatgaagcgtctactctgtgccaggcactaaacgtttatgaagcgtctactctgtgccaggcacaggcacaagaagtctcagttcttgggagtgccataatcaggaatggacaaacaatgatcagatctggctttgcgccagtgtcacgggaatagggaggaaggaagggtaggcgtgggggtcaggacaggatgcaggaggaactggtgcttaggtgagcgaaggatgggtgggagttcacaaggcagacaaaaggcagagcagcactccaggcagaggaacagctcaggagaaggcccagacggcaggcttcctgggaacctggaatgcagagtgctgggaaagcacagatgaagcatgagtctagaagggaaagcgagaggttataaagcacctggaacaccagcccacagggtttgactttagagatgatggggagccgttgaaggtccaggagtcaggcagtgaagtgattagatctgtttgagagtgatatctgacaactgccccattttaaatgaggtaaccaaggcccagagaggttgggtgagttgtccaaagccacacagctaactagcttcagtccctagagcagagttgatagaactctaatgggttttatactcattgtcacccctccccaccatgcctttccctaccctctactctcttcctctcccttctgcccaggatgaccccttctcagctctggatatccatctgagtgaccacttaatgcaggccggcatccttgagctgctccgggacgacaagaggacagtggtcttagtgacccacaagctacagtacctgccccatgcagactgggtgagggggaacaagggggtcaggctatagggggcagggctggggaggctgtcaggcatcttggcaggaaccaatccgttgtcttggtagcaactgctgagggccacaaagcataagagaccagcactggatggctttatgcatgctgggcatttcagggagaccctgtacaggccaggggtttggtatcacctagacccacagacactccccatcctggcccgggccccccatggtacactcaaggctggcaccaagaagtctcaggaataatcaagtgctcacttctcaccttctgattcctgcccttttgatgacccatccccgcagtcatggggagtgcccatttggatggaaaagccctcttcccaccctatgaccttcccggggtggatggatgcaccaccccgggaatcatatgggaaatatggaaccaaacaatagcagtagtaatagaaacttcaggctgggcgcaggggctcacacctgtaatcccagcactttgggaggccaggacaagaggatcacttgagcccagaagtttaaggctgctgtgaaccatgatcatgccactgcactccactacagcctgggcgacagagccttgtctctgaaaatttgaaaaaggaaagaaagaaagaaagaaacttcaatattatcagtagagtccaatgttgtgaaacccctcattaactaaatttccatactcttcagtaggtagaaaataattactttttgattcattagaaagcacttaatttttaagatggagatcatgtaattttgaactctaggtcttgcctactcctatataaattctcctctaaacaacagccaaaattgaggccctctttgagcttcaggctggtgccaaatggctctgcttattttccccaaaataaatcttccttccatgtatgatgagaccccctccagtataaagaagacccaaagaaaatcacccaaagaaaaaaggcccaaagataagacccaaagacctaaagatttaaatatatatacagatacagaaggtttgtttctgagtttctgtagtgaccttggcaataccttgtagttcaggacaatcctgaggaacacagaagtgctggcttccttgaggaatcagtgatcaggactctcgagccccttgaaccccagcatagggcgggagggggtgagggcagcaggggtgggtgtctgaattaatgtcaggtctacgtgatggtgtcatcaagtgttccagataaaaagttttattgagccgggcgcggtggctaatgcctgtaatcccagcaccttgggaggccaaggcgggtggattgcttgagcccaggagttcgagaccagcttggggcaacatggtgaaaccctatctctataaaaaaaaaaaaaaaaattagccaggtatggtggcgtgcacctgtggtcccagctactcaggaggctgaggcaggaggatggcttgagccaggaagcagagattgcagtgagctgagatggtgccattgcaccccagcctaggcaacagagtgagaccctgtctcaaaaaaaaaaaaaaaaaaagatttattgattccaaagaggcatggccacacacacttagaccagcaggtgctttgctaagccctgatggaggctgccagacccgccgtcaagaggagctaagggtagtgtacaatgagcccacttagtgtatgacggccgctgccgtgggtggagtccttgtgagtaaccagccagcttgagcaggatgcactaatttgctctgcaaacccagccattgagaaatacgcctcagatgtaccgaactctaggtcctaggagtatgttggttggggtaggttatcaataccagcccacttgcagtggatgagctggtggccatttgtagtgaggaaagggatgtgtcaacctccatcttagactccacaattgagggatgtgaccaccattcctccccagccagcccccaaaccacgtttgttgctgcctttccagatcattgccatgaaggatggcaccatccagagggagggtaccctcaaggacttccagaggtctgaatgccagctctttgagcactggaagaccctcatgaaccgacaggaccaagagctggagaaggtgggtatatccagggatggccaagcagccacccctggatgcaaaggttctgctagaacctgaactcataaaggtcttcctgtccttagtgccccaggaagccccctaaagggcagatgtgggagctgggcatgaactggctcctaccagaggagagacagtacctgtgccaggtgcccagggcagaatcaggtgggcaccttcgccttatcctgaggtagtcagatactatttagttgcaaagtttcagaaaatcaactcaaactggcaaagaaaactaagcaaagaaaacaagagggaattaaggatttattgacccatgaaaccaaaaagtccaggtgtgtcatagctttaagtgtgctggatccaggtagtcagtgtaatcagaaatctgtttctcccatctcttgactctgctcccctcaaattggctcagctcccctcaaattggctccattctcatggtatcagtgagggccaccagcagtcttaggtttacattctcccagctcaacaactctgccagaaaaaaagtgcctctttccccatagttcagcaaaagtcccagggctgagtctcactggtccagtttggtcatgtgcccacccctgaacaaatcactgtggccagcggtgtggaatgtgaggattggcctgtcctgggtcacgtgccactttgggagccagatccacctgaatcacagagactaaaaacaggggaagagtggttccccacagggatatgggggtgctattatctgatgaaggggaaggactaaatcctggcaagatgaatgtgtgtctgtctgcccctccctcaggcagggacaaagtagaaatctgacattggtcatcaccagagtagttaccccttaacttccccttcccccaccaaccatatatcctgaagacattgcccaggccacatctgtcttttaggagactgtcacagagagaaaagccacagagccaccccagggcctatctcgtgccatgtcctcgagggatggccttctgcaggatgaggaagaggaggaaggtacaggcaatgggactgggagtgaaattatggcctgaggtctgatcagccacagagaggctaaggtttggggttctgggtgtggtgcagtagtgtgcctttgattaaatggcttccctctgtgtgcccccgttgtcccctcagtaagtggggataaaatgccctgattcaccctcagagggatggaaatgtgtagccacagagtgggttcttgcggcctgcagaggaggcagctgagagcgaggaggatgacaacctgtcgtccatgctgcaccagcgtgctgagatcccatggcgagcctgcgccaagtacctgtcctccgccggcatcctgctcctgtcgttgctggtcttctcacagctgctcaagcacatggtcctggtggccatcgactactggctggccaagtggaccgacagcgccctgaccctgacccctgcagccaggaactgctccctcagccaggtgtgactggcggcccatggcagaggttgggagtggggatgggggaagggctgagcccatgggcaccctggaactccaaatcactctctgcctgtgaaggagtgcaccctcgaccagactgtctatgccatggtgttcacggtgctctgcagcctgggcattgtgctgtgcctcgtcacgtctgtcactgtggagtggacagggctgaaggtggccaagagactgcaccgcagcctgctaaaccggatcatcctagcccccatgaggtacccgtctcccctggccaggctgggactgtgagcaagtcactgttctctgagccttagtcttcccatctataaaatggggatatacaacctgtcacaagcttgtgggggtgactcaaggagacagtgtgtgtaaaagtgccctccttgtgcaagaagcagggagaaactggcatttactcagccagatactgtgataggcattgtgtgtggttagctcatttaattgttaccatggccctttaaagtgagcgtctgcacatccaagtaaagattgttttctcctccctaagtgggtgtaatttgcccatccccacccatgagttcagctccctgccctcccctcactctctctccctcagccagcctcaggttttgacactgggggaacaggtagctgttctattaataatttcctgtaatgggatggataaaaatctcaaaggccacttgatgtcaaagaggtttaaagttgtccctgcccaattggttggccaacttggcttaaaaacacaacaggcaaacagattttctggccccttgtcgaggctagacctcacaatctaactgcactttttactttccagcctcatgagttttctgtggcccacagatatggcctccaagtttatttacttttactctctatttgccccagctctgtagttctgaaactccctggttggggttgggctgactctgggtcagccagccggcaggctgtccccagggccctgttcctcttggcaggttgtccctctggagaggactctgtgtcccaggaggacagctgctgagtcaggccgagccggcagctgagaaaggcggcagtcgtcagatgggcttgagaaactgaaaggctaacgaaaggccagcgcccctttgggcagctgcaggaattcacggggatacaggccagatgtctacaaattggcagaggatgccagacccatgaatgactccagagacacttacatgaaataattaactatctcattcagtaaacaggaagtaaatcaatggacaaatgagtaactcttcctctggctgcctcttaggttttttgagaccacgccccttgggagcatcctgaacagattttcatctgactgtaacaccatcgaccaggtacagaggaccgtgccacactatccccccttccagagacacctcggacccctgggggcttctcctgtctgaggctgggttccccagatcaggtgatcacagccctctgggaagaagccagtgtccccgatccgattataatgctgcttcagggctggggcctccctcgtgggagcctcacagtaaggctgagggaaaccagatccctttagcttccacctgagatcccactggctttctctagtaaagttccagcatattctgaaccaaggtggctgattgtatggagaatattcattttgattcagcctgtgttctttatttaccattgtaccagatggtgtgaaaacaaaatcttgattcctacctcagggagtttaccttgtagctggagagatgagatacgtgcctataataaagggagagcaaggccgggctcagtggctcactcctgtaaccccagcactttgggaggcggaggcaggcggatcacttgaggccaggtgttcaagaccagcctgatggccaacatgatgaaaccccttctctattaaaaatacaaaaattagccaggtgtggtggcaggtgcctgtaatcccaactacttgggaagctgaggcaggagaatcatttgaacccaaggggcagaggctgccgtgaaccgagattacgctgctgcactcaagtctgggcaacagtgagactcagtctcaaaaaaataaaggatcaaaaaataaagtgagagcaaaacatggcggccagtagcactctaaacacagtcaataccaaaattcacctcactctctccccctcgtctccctcagcacatcccatccacgctggagtgcctgagccgctccaccctgctctgtgtctcagccctggccgtcatctcctatgtcacacctgtgttcctcgtggccctcttgcccctggccatcgtgtgctacttcatccagaagtacttccgggtggcgtccaggtgatggcctcaggggtgaggggtgggaggtgctttgcaatgtgcagtttggtgtacttgctagactcatcgttatgagagtaatagggtcgtgttccctccaaaaaataaaaacaaaaaacagaaatgaaggaaatagaaatatccacatcttattccaccgccctaatataatagtctgccaacacacgcacacactgaggttgacatctgaattatttccttgggcgatatggtcaggactggaattgctaggtcatgataaatgcacattttatgcccttcattcattttgccaacatgcttcccaggagggttgcatcattctagtggtcaggctgattgctgatgcatgaaatcggcgggcacctgattcaagcagtgttatgataacacctcccagcccacgtgagtccagagtgtagctgtaagccttgacttgagggagcctctcacagccattctcatggatcacatttgccctcatgagctttggatccatgcacgcctctttcctcctcaaaattttctaagaatgttctctagggagttctttctgggagtgattctcccagattcatagaaactcatagattcaaaaaattgtaggaaaaaatttaaagaacgtctaggccagtgtttctcaaactgccaattacagcccatcagtgggtcatgaaatcaatatcatggatcacaaccagcatttttttaaaaatgaaaaaaacatcagactgtattcatagagtaaagcaagctttgcttcatgaaacctttgtgttggtcatggaggtgtgtgagtactgatttgtgagataaaatatatttctgactgcaggttgtggtcagaaaggttaagtacctttcccaagtgcacatagttggctagaaactagagttgagatacttattagcaataataaaatttagatgcattttggacacaattacctgccccaaaggatcaacatttgtataaatggctttttgcttggatgatccagaatggcccgacacccacacgaacaacatagctttttgacactcaaaaaattcaaagtgctgcacaagctgttctacaaagttcatttcttctgccagagaaacagcccagtctctgtggcacccagtctgaccctggagatggtttatcagggaaatcaacttcctgcatcccaaactggcctccctggcactgatgtgcttgtcgaggtgcagctttggggagcaggaggcaattctgttgccatggaaacctctggccttaccccgagacgaaacctatcatttcagcacatcactggccagggtctaaagagctccttgatggggtaagcggaagacggggttgaacgctttgagtttggtcttctgttcctttggccagctgtctcaaggttcagattgttcacctgtaaaatggaactagcactgcctgcccagccttagctcagctccaggctgtgcagcagaagtacagggacagatggcgacctggggttgacaatgcccaggacagcagtaattgtgccccacatcaggctgtgtctaagcattgtacataaacgatctcattcagtgctcacaaaagctcaatgggctggtggcattgtcttcccccttcacggggtaagaagctgaggcctagagaggtaaggccattcacccacacagcggtagcaggtggagctaggcttcaggcccaggccgagccctgagcctgccctcttaactgttccactctgttccccgccacagggacctgcagcagctggatgacaccacccagcttccacttctctcacactttgccgaaaccgtagaaggactcaccaccatccgggccttcaggtacgagtccacattcccccaaggtaggagtggaacaggggtggggccagggggcacaggccatgagatttgattctcaggactccacttgggaaggccaaggacacgttctctctcaagctgcctcaggtcccaaggcccaagggatatccaccagcagggacaggccaggtgggctcccactgaatgttctagagaggaaaattccagctctgtagacaagcccaggacctctgtgaggcagagcatgaaaagagacaaagctgggacaagtcttcatgtatcaacgctagaaagggccttaggtgcgggccaccctaagcccttcttttattaaggagcccctgtgtgccaaacactatgctgagtactgtacaggccaatcccactcattctgcactgcaaccctcggtgctgagaatggtcatttccattgcacagacaaggaaactgaggcacagagacgttctataacctctctgtgtaaggtgccacaaagcccagacttgaacctatttgttcatgcaacaaacatttactaagccccgactatgtgctaagccccatgccaggcactaaaaagatgagtcaaataagccgctgccctgcaggcgtttacagcccagactttgagcaggccaggataaatccacgtgacaagtattctgaaaaaagcggattcaagggctgtgggagcatagaagagagacagtccgggaaggtttttgtaccagaggtgtcatcagaactaggactcaaaggaggggcaggagttcaccaggctgaggaattcctgaaaacttcagtgcccctgccatcgtctcactaccctgagtggtgatgttggggtggacaggagcatctgaggttgcctggggaatgagggaagctgttgtttcccactccccaagagtctgtctgatctccagaggcatctctcttccagtcaggcaggccagagacccctgacacacaaagttgggctcttttctcatcttcatccagagagtgataataggttatttttagggtggcacagctgcacgaagtatgacagtaaccatgagacaccaagcactgtgtccaggagtaaccatagggcacaaggaccagccaagggccagagaggcttacatctcctccccccaacccctgaagtccagcttcagccctggagaggtatccaggcccctctgcccaccctggagcacctagggccagtggaaatccacctcttagggatcttgtctaagtaaagaagagcagagcaaagctctgccctggccttggcgctgctccctggacatcccttgcccctggacaagcctatgctgtgtcttccacaaagaagcttgctggggactggattatgactctagagtctcctcccagcctcctcttctcaagcctgaacttctcccgttccttcaacttccaggtccctcgacattactgagcctagcctttgctctaagttttggtgatttccctctctcaattggtgtctcagagggccctggggtagagagatggtgactcttctagagtgggccacagccccttgtgtgcagatcccagcttcctgtaaacagcctcagatcaggccaaacctgtggtcagccagagccactgctacccagtgaggtcttccacaccctactgacacggtgaatgatttttaaatttgaatgaaaggctttttaatcaaccccatacacatttaatgcattggctttaatccagcagcctgttgagagctattagcacttattgattgcccacttactgtatgccaggcaccgtgctaagtgttgtatgtgcattattacatttaatcctcacaaggaccacataacataggtacgaatcgccacattctccagatgcagaagcgagacccagagaggctgggtaatcaatccaaggtcacacagactgcgggggctggcgctgagcttggaacccaggtttgcctgaccttctgggctttcctaagagatcttattttttcccaaaagagtttcaagagtgcccagcactgggctcagtggcgggctcggaggttgttttcgttcatgtaggaactatcacttccccatttttttcataagaaaactgagtctcagtcctgatacacagccaggaagttgtgatgttcaggctccaacctgggtttacatggctccgaggctggggctcttttctagtcctcagacacactgtcgcacgcctgtggcagaagctcccatctcacacttgccgaccctcaactcacacagtcctgagacccacatacgctgagcgcctcacactcctataacacgcacatgccctgatgcacacacattttcaacacgcacttactctacccttcaggcatggtttcacactcactgcagacacgtcaccctcccacacgtctccaccctgggggtgtgcagtagcatgctctctcccacctcagaacctcccttcagtcccctcagacacatgccctctctccacgcagagacaatcaaagctgaactaacaccttccagggtgaaaagcaaatgcccagtaaggtacgtcttgggtgcctccgtgtcccctgagtttggtcctatcaaaccagcgatgatgaggcagcttttctttcgttccttcctccatcatcaaacaagtgctcctgcatctcctctgggccgggcctacgtcagcaaggtctgagggaagcggccaaggagagtgatgacggcagcccaggttgatcagagaaaggaggcaggtccatgcgcagtaactcagggaaaacatgatgaggacctaaggatgagaaagaagcctccagagttccctgtgcagagagattccatcaatttcagagggtcaggggagtgccatgcattcatccaacaaatatttattgatagtgccaggtgctggggtatattggtgaataaaacatcttcatggaatttgcagtctattgagggagatgattataaatagctagagaaatgcatgtacagcagatactgtggagcaaacaggttgcagacaataataggggaaacctactttatagtaaggtagtagccaggaagagcctctctgaggaggcagcatttaaggcaagccctgaaggttgagttgagccagccttatgaagagcaagggcaaaagccttccaggaaaagggaatagtgtgtgcaaaggccctggggtagggaagactttagtattgtcacagagcttttaaaaagctgagtggctgcagcatagtgtgtggggtgtttgtggcaggaattaggttggcaggagggggttcttcatcctataagcagtggaaggtcattaatattcttttttatttgtttttttttttttttttttttttttttttgaggcagagtctcactttgtcacccaggctggagtgcagtgaggtgatcttggctcactgcaacctccacctcccgggttcaagcaattatcctggcttcctcagcctcccaagtagctgggattacaggtgtgcaccaccatgcccagctactaatttttgtattattagtagagacagaattccaccatgttggccaggctggtcttgaactcttgacctcaggtgatccgcccgcctcagcctcccaaagtgctgggattacaggggtgagtcaccgcatccggccggagatcattaatattctaaacagtgggggagaggacacagtttgcgatttagatagattaagccagccactgtgtggagcatggactgtagggagacagcaggtagacgtattcaggaagctgatgcagtagtccaggtgagagtttgtggtgggcaggaagcaggatagagggggagggaggcaaggactcttttagagagagacataagaggacttgccaaggggctgaatgtgaatccaggtgattcctgggtgagaaactgggtaaagggaggtgccccttattataatgggaaagacctagagaaaatggatcttggggtgaaaacaagagtttggaggaggtggggattctggacaggtttgaataagcagaaaggagtggggtggacattccagagagggatagcttacatgaagtggccacggtggcatgtctggggactggaggggccctggagcctccctctgcaggtagggagactcctaggagctatgtggaccaacactgttcccttaggagcttctcatcctccctccaggtatgaggcccggttccagcagaagcttctcgaatacacagactccaacaacattgcttccctcttcctcacagctgccaacagatggctggaagtccgaatggcaagtgctattcccctctaccctggcctctgataggagggtggggccagagcaagagcacacaggtacctggggatgaaagagaggataggataccagatcgtgtggacaccaagccttcctgcttcccccagccctggtggtcctcctagtgtctagcctgtgctccttttccccatatcactgcctggaggcttgtgtatctgaggtgtgtgccagtggcaagaacagttgtggtgaatgtgtatctgcagtgggtcatatgacacccacattgtgtgtgtttgtgggccagctgaggcgtgcatgttaaagggtgtgcaggggctagggggtaggggagcatgagcttgtgggacatgttggctcctggggctccagccttcgcagcccttgtgtgtgtctggtgacgtgtgcatgagttgcagggctggagtggaggcctggctgagctgctctctgccccgaaaaggagtgaggtagaacaggggcctgtggctctaacccctgagcgcccaggtcagctcctctccctccccaggagtacatcggtgcatgtgtggtgctcatcgcagcggtgacctccatctccaactccctgcacagggagctctctgctggcctggtgggcctgggccttacctacgccctaatggtgagcggcagtgggctagggcagaggaggggtcagacaccagcactcccggagcaccttcgtcactggagacatgagacactcccaggccttaccccaatttcatttgcatctgatgccagagggacagtgcgggcaggaaggctgaccagcaggccccagggcccaggccccagacaggtggaggttggggagccacatgactgaccctccctgtgcctccagggagggctgctctgagcaggcagtggatggcagcaaaaggaatctggggccctggcccctctccagccttaagaagagccattctggtggctgaggacagaactaagcgaccatggagtgtgcgccactggcttgctccccacaggtctccaactacctcaactggatggtgaggaacctggcagacatggagctccagctgggggctgtgaagcgcatccatgggctcctgaaaaccgaggcagagagctacgaggggctcctgggtgagaggctcagggagaggggtggggaagagtccaaggaggagtgtgtctgggttgggggccacaagggagcctggggatggggtggcactttcggatactagctgtggcccatgcctggtggctgagcccagcccggcccccagcaccatcgctgatcccaaagaactggccagaccaagggaagatccagatccagaacctgagcgtgcgctacgacagctccctgaagccggtgctgaagcacgtcaatgccctcatcgcccctggacagaaggtcagagcacgggcccaacccaatgctgcaggacaggcgtgagcaggggatggggcatgcacggagctggatggcttcgcagtcacctcgtggccctccagggccgaggcctctcactattcagacatcgcagtctcctgccctgggcctgtgggggcccatctttcctctccttctattgccttcccccagtgctgccctcaggccttgtcttctcactcatccaccaaggagaccgacactctggactcccccagctcacacgggctttgtcagggcctccctctctgcgaatggtcaggggctttccctagggcactgccccgagcttcagggcagggacctgggggcagacagcgaggccacccttgtattgagggtgagcccctgcctatggccctggcccagctctcctctcgtttcccactctgtctctttgtctctgtctcactttgctgtggctgtccatgtcattctctgaccttgggatgtacctctgtccctgcctctctcatccttctatgtcactatctgtctccgtattgtaatttctgttggtacccaagtgccaggaagcaacgggatcagaggtggctccattgtagggcggggcacacagacacatccatgcataccactctcagctgcccctgtgtcctcctgccacacccatgcccatagagacacaccactgccccccagctctccttcagccaagtacccggcacacccagacccacaccaaggcccaggcaaatggacatccatgcctgcacttgcgtgccggtccctgtgtaagccctctctggacccactgcaggaaacaagcccaaacctgtggtgtccaaagagaaactagtcagaaaaccaggccaaaaagataccctgtgacctcccacacctgcacacacacccagagctagcatagaggctattcccagcagccccagagtcccagtggcggtgcctgcttctctctttccagatcgggatctgcggccgcaccggcagtgggaagtcctccttctctcttgccttcttccgcatggtggacacgttcgaaggtgagttgtaaggcgggcaccccacgtgtacccacagccaccagatgaggcctcagccctggcacgtggtcagacatgacaggaggcccagcagtcaccgccttcccctgcaccctcactgggacccatgcagggcacatcatcattgatggcattgacatcgccaaactgccgctgcacaccctgcgctcacgcctctccatcatcctgcaggaccccgtcctcttcagcggcaccatccggtgagccccaccacccctcaggcccacccagccccaggccggctcagttccatcagatctggagcacaaagaggagggggttgggggagaccaggatcccagaggtgtttcctgctcatgcccttctccatcccatcaggcccaggcagcctctggaaggggatcccccacccatgggtctaagatgctgtcccccacccactgccaccacctcggtgcttctcccagccagacctccaactcagtctgctctcgctcactgccctctttgccgcctggggatgcaggcaggaccctgctccctccctactggggctttctgtgccacttccagatttaacctggaccctgagaggaagtgctcagatagcacactgtgggaggccctggaaatcgcccagctgaagctggtggtgaaggcactgccaggaggcctcggtaactactcctggctatgcagctgggttggttgggcactcaaggaccctgtaaggatggcagacagaagcccgtgtctcaggtttgccccaagtttggagtctgaagcctggcaggaccatttagtcctacttctcactatacgggggcccagagaggtcaggtgtcttgccccaggtcacacaactggtcagttcagggtctggctcctcctgcagggtacagcgggtacagtcagggatccttgtgagacagagattgcgagtcccccatgccaagggggcatcttcagccctgccctgccccatccacctgcatgcccagttctgccttaggggaggagaagatggactgggcaatcatagacacgggtcactcatcaaggccaccggtgattggcaaagccttggtatatttgctgcagctcctggagcattgggggtggccaagccttggtttcaatgaatcaccctaccaaggccctacatacacactcagtgcacccctcagtgcacacgccccctcccagaactgcccagggccacagcagcacacacctccaggggtgcccttctcgttgcagtccttgcagacggcctccacattgttgtgtcaggtgcaccagccctgcacacgcctgtgctcttggacacacacccacctatttgcccccatgcacacattttccaacagccccccaagccatcccatctgctccactcacagcacaagattaactcagtcctacttcatctccccgggctgttttcagatgccatcatcacagaaggcggggagaatttcagccagggacagaggcagctgttctgcctggcccgggccttcgtgaggaagaccagcatcttcatcatggacgaggccacggcttccattgacatggccacggttggtcctgggcccctccatgggaccatggtcttggaaagggtttagtgggatgctagggagaaatttgcacgaagtagtcctgaggctcaagttgcctctaacatcaaatgctatgtgttgcagaaaatgaaaagagctggggggaccctgactctgtctagtcttagggaatgttacacacacacacgcacacacaaaaacactatgcaaacacacacataagctgcacacacagacccacacagacttcacactgtcacctatcacaacagcacacacacagccacaaccacaacctacatacacacacagagctgagctcccaacaggctgagtccagtccctgagtgccgggaacctgttcagtcctgtggggtgggggtgggactaggatcggggtcagatgggagctgagccacagacctgggctccacatcccccaagccaggccagaccccatccactgggcaggtgagccaacagctgttgcccccacttggcaggaaaacatcctccaaaaggtggtgatgacagccttcgcagaccgcactgtggtcaccatcgcggtaaggggcccattgatggggtgcagagggacacccagggacaggactggcctgttgtggccgtcatcagtgcacagcccctgggcttgcctggtcccagtaatcaagaaagaaccctgaagcaggcagttcagggcaaggggcctggagggcatgcagggagcctgggttgcaggatttggggtggggggttttgcccctgtgcttccctcagacctcccctctccttctccaggttccaaggcctgcccctgtcccaaggccttatatgttaggctggcgttacttctccataggaagtgggggaggggttgtggagggtctctgagccttgaagcctggaggtggggtagagttgggacttggagaggagagaagggtggtattagcagatggagagcttgtagtcacatccaccccaggaaagtgcagtccccacagtgacaggacattctggccacatgcctcatcctcctcctccaagccgcaggagggccaccctcagctgtggcccccaccgcgggtggtattcccaccatcctgacccgccccctcctgccctgcccagcatcgagtgcacaccatcctgagtgcagacctggtgatcgtcctgaagcggggtgccatccttgagttcgataagccagagaagctgctcagccggaaggacagcgtcttcgcctccttcgtccgtgcagacaagtgacctgccagagcccaagtgccatcccacattcggaccctgcccatacccctgcctgggttttctaactgtaaatcacttgtaaataaatagatt

SEQ ID NO: 15334 - DNA, 83941 bp, Homo sapiens
aggcgcgcggagccagcggagccagctgagcccgagcccagcccgcgcccgcgccgccatgcccctggccttctgcggcagcgagaaccactcggccgcctaccgggtggaccagggggtcctcaacaacggctgctttgtggacgcgctcaacgtggtgccgcacgtcttcctactcttcatcaccttccccatcctcttcattggtgagtgcgcgcagcgagccgcggaggaggggacgggagagcagggagggaggaggaggcgctgcgcgccgcaccgctcggcgtccccttccggcccgcgaccgccgtccgcctcgttcccggggtcccctgccctgtgtcctgcccgccggtccccgcactcgcacaccagctcatcccttcactcccccggtgcccccgatcccgcgccaaacacagcggacgtttgtgacccatgggatcaccaagttttgcttctgcagggccaagagctgggatggggaaaagggaaagaggaggtctcagcacgcagtgggaaactggagaggggtcgggcctcaccctccgtggcgcagcttagggagccgggtcacccctcccgcaaggcagcctccctgtcagccgcagctgggcctagggaagagggaagcctgtgctttggagtctgggatggaggcccagctaacccctatgctttcaccgggctgagccgcgcagtggtccgtgatctctgacagtcccaggcccgcgccctgggcgaggagaggcgagagctagggacttggattcccttcccccgccaccccacccgggcatgtgtctccagagcgcaacttctcaggctctgcgcaaagtagctccgactcgccgacgcagcgaccccggcgcccttgcttgcaaagttgggcgccacggccgggacaatcgtgcgtgcctctccactgaggtcccccccatctctctccaagaccttgactcttccagaccagtcaagtctatcaactcatagggtgtcccctgcatccccaaaacgtgttcattcactttaagaaaacaagcaaatcttaaaattcatatacagctttggggaagaaaggaaagattgtcacaaaattagatttacaagaggttgctgcagaagcagagttgctagttattaacaaagacagttagatagaaatagaaataaaacatacaaaatatgtgctcatatgtgcatcaaaaatcaaaaaagaacagcatttacacttctgttctcagccaaacggtttattaacctgatgacttgtcacacaagaagttagtatgtataatggggtaccttggcagggcacagtggcttacatctgtaatctcagcattttggtgggctgtgacaggaagactgcttgagtccaggagttcgagaccagcctgggcaacatagtgagaccccccccgccctttctacaaaaaattaaaaattagctgagcatggtgatgtgcgcctgtagtcccagctactcaggaggctgaggcgggaggatcacttgagcctaggagatcaaggctgtagtgagccgtgatcgtggcactgcactccagcagaggcaacagagcaagaccctgtctcagtaaaaaggtgtggtgggggaggtaccagcataggaccaggctgaatgagttggacgtttagtttgtgtgtaccagccttggggatcctcatgtgtaggtgtcaccctcaccatggacccaatgcccaagcacctttctggggttcatgcaccctcttcctcctccaagtgggcaggcatcctgcctctgactgtctctccctgcaggatggggaagtcagagctccaaggtgcacatccaccacagcacatggcttcatttccctgggcacaacctgcggtggatcctgaccttcatgctgctcttcgtcctggtgtgtgagattgcagagggcatcctgtctgatgggtgagtgactgtctgaggactcaggaaagtgaatctgctccagggtacttcctgaaaggcccaaggagatcctagctcacctatattccacaagcccatgtcttttgttactacatccagcagctcagtgtcttctatgtgccaacctctctgagctgggcactggacgcaagtgagtcccaggccctgccatcagtccaggagagcagagggaacacggacctgcatgccaagtcccagtgaaataatgctagagcctattagaatgccacaactccagtgaaaaatgtctggcctcttctacaacctgccggagttaccttcttggaaaaaaaaaaaaatctaaccatgccacccactcttgcataagacctttccttggttctcagctgttttgaagatgtggtctcagatcctcagcccaccattcaaggtcttcacagtcagccccacctatctctggcctcattccccatgcccaccttccgtttgggcctcacagcacactcctcacacctctgctacagcacagatcacactgtatgttaaagtttatgtctatttgcaaaactgtcttcagagtcagaaaggcctaagagttagaatctgagtcttgttcatctttgtgttcacagtgcaaggcatgtgataaacataaacattattcagtccataaacatttattgggtccttaggagaatgaatgaaaccatgttacaaataagtactctgggaggtgagaggaaggcagaattgggcaagctccatggttgagagggctttggagcggagtctggaagggtgactaggcttcagacacacagaggaggaaggagagagagaactggtggtgcctgagggaagggaaaaggcaccaaagagaaaagcaggtagggctagggagcagcgcaggggctggagcattaaacacaggctggggagcgatggaggctgaggctgggaacccaggttggggcatctcaggaggactgtgaatcccagcctgcatgtttgggtcggatttggtcagcagtttggaacagaagagagatgtcatcagcataacacttttaggtgggaacctgaggtgttcagcgcaggctggaggcagggagaatctagaggtataatagaagcaggacttagcattgactgcagtagtctaggtgagcaataactgcagacagaaatggtgtgtcagcagtcagggacagaagaggagcgggagcagccatctcactaaggaagaatccagtaaccagcaaggatgagagactgccaggagagggagtggtggaggagagggatatttggcttgagtatctgaggtccagcgccccctgagctggaatcagattatacccagactgcactcctgcagtgctgcctggctcctgtagttggatggcaggggataggctccctcatcctccctcccgttccccaccttcccttccccaatgtccctgcatcctggcttcagcagtgatctctaaaatacctgcttgacttggaggcagcagctctgcctgcttattaaagtccctagaccagcaagaagaccagaaggcatactgctacacaagcacgtgacaagtccgcctccacccccacccctacaccccttccaaagtagcacaaatgccacagtgagccctcagatgggaaatactcaccagatggtgacagagaaagacacctccgcccttggagaaggaagacctgggtcttcagtgagcactgctgctgtgtaccagctatgggactttgcacaagtcattcaggctttctgggcctcataagcatttataaacatacgataaaacattttagttgccaacttaaaaatgtgtgagaaagtataaggtgtttcaaaattatttcaaggagtaaagaggcaagagttttgaagatccctgggcagggtgttggctgttcccagtgtggccattcatgactgctctctggccttatgaaacaagcatcatagtccctggcttgcctgcttcatggggctgtggagggtgaaattcgagcatggacagggtgcagagcccggagtggcagagcactgggtagactgtgtattcccagaatgtgggaaactggaatgaatcggtccagggatgccctcctgctggctgtcagcagcccctcctgtgtgtggctgtactgcttcagctcagtgcaaagggccatctcctccccagggcacagatcagctcaagctgagtaattgtcatctggtctttgtgagctcctacccccaggcctgagtgaggggcaggaaaagagcagacaggagaagtcacagacccttgtgatacctccagtctaatccagcctgggttttcagagctgtctggaaatttagggggcaggtgggagggggctgattaaggcagccctgatttgatttagagtgagcctcatttagtgactaattaagccatcttaaacctgtagggcttcccctcttcctttgggtattatttctttctgtgatgttctgaattcagaacaatcaaaacagtataagttagtgaagaagatattttttaataactacaatattttcccagaccaccatacactggataaagcctgtatataaaactttacctaatttcttaactaattgaatgtgtattatttaacaaagcagctaaaaactattctatgaagccatgtcatgaaatatttagttcaattatggttaatcctcatcttatttcgtcttataaaattttaacatttctacctcctattgcaaaaaaaagcatttatatcagcatataataaaacatgtctagatgtcagcttaaaaatgtgtgagagagtagagggtgtttcaaaattatttcaaggagtaaagaggcaagagttttgaagatccccaggaagggtgttggctgtgcccagtgttgccattcatgactgctctctggccttgtctgtcttgtaccttctatattagtttgaagaccttttttggagaatattcactaaagaatatcaatatctaccatttcattaaaaaagaaatgtggagtttgccttttcaagttggtttgatgcttattgatgttttcagggacccagcctcttcccatctttccataccatcctgtgtgtgtgtgtcagcctatcttccccatggtcacaaggtggctgcctagctccgggtattgcttagcatgagcagagagggcatgctgccgacatgcctctcctttatgacagagatcattctttctttgacatctcactggccagaatacgtggaccaacactggcaaaggagtatggaattgcatggctgcttaaaccaatcaccatccattccctggggctgggtatattgctgctggagcaaacctgtggtcctcctggcacagaataaggggaagatactctttggtggacagcccacattgcctctacacttgcacctcagtcccaccagacccactgaggtcacaggatagctctcctcatgtccttcctccttctctgttgaactcttatgtatccttcaaagtccagcctggtgccacctcctctgggaagctgtccttggttgcccaccccctcctttgtgctctctcagtctctgtccatcggcagtatcacttccctagcctgctgactccaacagttagctctgagcatggcagccccctccataccatcagcttctcaagggcagggacccttggcacactggatagaagtagcctggtgggcaacagcagcactgaggcagcaagctgtagcaggccatctgggaatggagtgggtaccacagggctggagcagaaagggcaggctgggcagatctgataaagtggctggaggccacatagcctgggcctttcgttccaggctgagcagagtgggttttgctgtctgcaggagggagctgtggaagggcatgatcacgaccaactaaggtgaccctcctcaccaggcccagggaagactgaggcctggaaggaggctctggctgcctctgggtcttacccccaggccacagtccacccacttagaggcctctgtgagttaaggtggagagactatgagctggtattgactgctccattccccatcccgagagaggagacaaaatcagtgaccttggaaatgcctcttcgtgcctcagtttcctcaccccataaaatgggagactaagagtacccactcgatggggtttaatgaagattaaatgggttaacatatatcgcatgcttagaacagtgcctggcacagagtaaatgctccataaatactgactctcatcagtttgttatcacagcctctggggagggcgccagtgctgacttatgctgttcgtgttaaatggggctgtcactgggtgagttgtggcatacaggcccctgcactgttcaagagaccccagcaacccttgtgcttagggctcagcacatagtaaggcctccagatcatatacccagctctactccatgtactggcagctctgcccagcccataccccaaatacgcccattaactaaagggccctgcagcctataaagtgatgctataaaggttcagtgttcagcctttgaaattcaaggcctgggctgctctattgcagtacttagcatgtccccatcctgtctgtttctctctcccatctcagggtgaccgaatcccaccatctgcacctgtacatgccagccgggatggcgttcatggctgctgtcacctccgtggtctactatcacaacatcgagacttccaacttccccaagctgctaattggtaggtgaggtgtaggagggaggggcagtaccttcattcatttcttcagataatgtttactgaggactcattatgtgccagctattgctctaaacagtagagatttggaatagaaaaagaaaaaaatccctgccttcatggagcttacagtctggtgaaggaggatagacaggcaaagacagtgaataaacaagcaaacaaataggtggtggggatgctatgaagaaaatcaagctgagtaaggggtaggggcaatgacaatgttgctatctacacaggatggtcagggaagggctgtggtaactgtgggcatgcagatatttgggggaaggtattccctgcaaggggagtgacaagtgcaaagtcctctgatagggatagatttggcaaagatgtcactgtgggcaaagccaaatgagcaaggggaagagtgggaggtgagggcaggcgtcaggagaggagcgagcaagagtcccaggctctgggcctgagagcctgggtgaactgtggcatcaataactgatgtgacagaggagggggaggtgggctgtggtggggataaagttttctactgggggcatatcgagtttgagatgtcacagagacagccaactcaagtgtcaagttgggctttcatggggaggtcaggacaggagctacactttcaggaggtgggccttgtagatgacatctaaagcttgagcctggggctggctgccgtggctcacacctgtaaccccagcactttgggaggccgaggtgggcggatcacccgaggtcaggagtttgagaccagcctgaccaacatggagaaacccccacctctactaaaaatagaaaaattagctgggcatggtggcacgcatcggtggtcccaggtactcaggaggctgaggcagtcaaatctcttgaacccaggaggtggagattgtagtgagctgagatcgcgccactgcagtccagcctgggtgacagagcaagactccatctagaaggaaggaaggaaggaaggaaggagggagggagggaagggagggagggaggagggagggagaagaaagcttgagcctggatgaggtcacctggggagagaagagaaaggctctgggaccagagcttgaggtttgctaacatttagagagactcgggaaggactgcccacttagagcttctgagatgttaaatactgcaggactggggtcccaggcagaagcaacaggatgatggttggtgtttactgagcatgtgccatggggcaggctccatgccatgttccttacattcattgtcccacaggctaattcccccagcctccttattggtattgttaatatccccattttccagtgtggaccctgaaactgagaggttaaaaataataacagtaaatactcactttgtacttactgtatgccaggccccatcctacctatgtgatatattaattcatttaatccttgcaacaactctatgaggtaggtaccattattattttccctttacatatcagaaaactgaggctcagaggttaaataactggcactagtctagctcgtcaaggggcacagccgggagtctagcatctgtgcaatctcctaatcatttctgagactgcgtgtctaagggccctcagacttcgtccttggggtaaaggtatcaatccgcaggtctgcctctgtgttggggttcagcctgtgtgtctaaggctggggctgtacatctggcagttagactttgttcacactatgtccttaagtcagactgatttttaggtatcacagcatcgaattgacatttggagtctggcacactctgtgctaagccagtgacatcatggtgttgtcagggagtacagggtgtttcttgcactagtcacaggtctgcctttctgtagaaggtgggatctgagctccattaggattatccaggtgatccccctacccctagcccaggggcccccacatgagtatgaatgggagctgggggaagcaggttgagaggggagatgttaaatacaggcttcagagagccaccctgcttccatttctgaagtagctccttgtctgtagagaacccttcattaaccagggcctggctgaccagtgtcctctggaaacaccctgtctggacatctgaggagttcattttctcattctccagcaaacacataatgttctctctttaaagcacaagttatcacccgtggatggatttgtccttttctaaggaacaaagactaactccctccattccccttgttggagttatctccccttgaaaggacactccacagagccagaaattctagaacagggaaaagtggaggggacgtgcctgtgaactgcagggacagaaggaaatgggtattgggagaatggccagccctccaaggggctgatgtctggcctgggtatggagtcccacagaaaggggacctgtgatgcagcttacattgtcccgtgagggaaccatgatcctggaacccagatgaggccaaggaaatgttctctgaaaaagtcatatttgagctgagaactgaaggaactaactgggagaagggaggaaagagtgcttcaggcagaggaaacagcatgtgcaaaggccccaaggcagaaggaacaaaacacattagaaaattcagaagaagaagagtggcgtgggtgcaaagtggaggggagctggactttgggttttgtttgcttgtgcccaggctggagtgcagtggcaccaccttgggtcactacaacctccgcttcctgggttcaagcggattcttgtgcctcagcctgctgagtagctgggaatacaggcgtgtaccaccacactcagataattttttgtatttttagaagagttgggatttcaccctgttgaccatgctggtcttgaactcctggccttaagtgatcaggtctcaacttcccaaagtgttgggattacagccgtgagccaccgcacccacctggaaggtcataccacagatgtttgcctttatcccaacagcaatgggaagttgtgtgtgtgtgtgtgtgtgtgtgtgtgtgtgtgtgtgtgtgtggtttaacatgtttaacataaaatttatcatcttaactgtttttaagtatagtgttctgtggcattaagtatattcacagccgggcatggtggctcatgcctgtaatcccagcaccttggcaggccaaggcaggtgaattgcttgagctcagaagttcgagaccagcctggccaacatgccaaaaccccgtctctacaaaaaacataaaaattagctgggcgtggtaatgtacacctgtagttccagctacttgggaggctgaggtgggagtatcatgggaggctgaggagagaggatcagttgagcctggaaagtggaggctacagtgagccaagattgtgccactgcactccagccaagattgtgccactgcactccagcctggacaacagagtgagaccctgtctcaaaaaaagaaaaaaaaagtatattcacagtgctgtgtagccatcaccactatccatctccagaactttttcatcttcccaggttgaaactctgtactcattaaatgataactccccatttctccctccttacagcccctgacgaccaccattctactttctatctatgaatttgagcactctaggtacctcatctaagcggcatcatgcactgtctttttttttttttttttttttgagatggagtcttgctctgttgcccaggttggagtgcagtggtgcaatctcggctcaccgcaacctctgcttctctggttcaagcgattctcctgcctcagcctcctgagtaactgggactataggtacctgccaccacgcctggctaatttttgtatttttagtagagacggggtttcaccatattggctaggctggtctcaaactcctgatcttgtgatctgcccacctcggcctcccaaagtgctcggattacaggcgagagccaccttgcctggcctatttgtctttttatgacttgcttatttcactgagcataatgtcctcaaggttcatccatgttgtagcatgtattgaaatttccttcctttttaaggctaatattctactgtatggatatgccacattttgtttatctattcgtctgtcagtgggttgcttccacctcttgactcttgtaaatagcactgctatgaacatgggtgcattgaggggttttcgacataatcataataattgctttatggagaccagcttggaggagaacaagatggggaggaagtgtggaaaccaatgagaaggctctcagggtatagcgggaatacagaggacgcatgatgatgcctggacttaggtggtaccacagggatggagagaagtagatagagtcaagctatttaggacgtgaaatagacagcatttgttaatgggagaggtgtggggcgagggagaagaatagagggagaaggaggagtaatgggagctcaccagcagcccccatgttatgcctctttccttccttttccctcttctctcatcaggcattcagcttttgctgagtacttctgtgtctgacaacaggctgagcactcagcactgcaggacaggactatgcaaaaaacctctgggcctagtcctgggtgcactgctaattccctgtgtgaccttgcacaagacatccaagctctctgagcctcggattccccacctgggcaggaagagtaagtccctgcctaagtcatagggttgtaatgaagagcaaagcagaccatatctgttaagtgttagggacaagacaagcatgaggcatattttcaagtctcggctcctgtaggcagctctcactaagggctaaagggcttctgatgcctgggatagaatctgtccggcagagtggagtggaggcagggggacagccttcagctgtggaattcctccagtcctagagaccagcctgagctgggggacattattccagtcctgaggcatgagagcagaaggccgatgcttctgccctccatcctaatgtcctcctgcagggacccaaggtggatggcatcgatccccccgggtgagctcagccctgggcgcatggtggggcccaacatctcaacctgtttcctaaccctgagccaggcaggacagatcccagatttgtgcccaagagatgctctggcatccatgcccaggcccacatagggatagagggcagggtgaaagtctctctccctcactcgggtcctctggagaggggctctgtgtcatgaagctgaccttatccgcatctggtctaggagggaggagggaaggagctgccagtgctaaaatctcccccaccctcaaagggggacttcacaggttattgctggttttggttgttggaagctgacagtgatttattggcagattgaagtgagtgtgtgtgcgagaatttaggatagaatctactgatagcttctgaggtttaccttccccaggtcttaaatctggagataataaaaatataacagctaatgtccaaagagcacccgctgcgtgtgaggctcactgcactaaatgctttccatatgtttctcacaagaaccttctaggtagcactattatgattcccacttaatggatgaggaaactaagctctagaaggctaagtgactaatccaaggtcacacagctattatgtcacaggctctgagcccaggtgtatctggctgcggagccaccaccactaacccctgtataacgctgcctcacagaactgtggctggctctttccgtatcccccatgcccctgctccatcatcatgctgtggtgggctctgaactgtgaggacagggatccaggctttcaccctctctctgtccctagctgccagtgcacttgggcaaggtcacatcctatttctgggcctcagtttcctcatctgtaaaatgaaaggctggattgaatgacctttaagatttccctcacttggaaattccacaagtaagtcattatagcatggagcttgcatgcatgggctccagcgtcaggccagcccagctctgccagttaatgggtgtgtggccttggatctgttacctaacctttctgagcctcatttcctttgtctgagaaattgggggtgacggcagtgtactttctttgaaaagttatggtgaggaatagataagatcatgtgtttaaagtgcttacttggcacagtgcctgtaacttagttaaattcaataaataaatttcccattcttcccatgatcatttatttttaagggacatttgtctgaccagtttgatttatgagattattggtgtttttcatgaatgttaagacgtacgtgcgtcatcttagagtcatgtactctgatatattcacacgtgcacatccacttactcggaaatgtacacacccaggcacgcttattctgtctccttctctgccacatacttgcacacattatgtgagtgtacacacatgatgcacacacgtctctgcgatcttccatctctcctcggcagccctgctggtgtattggaccctggccttcatcaccaagaccatcaagtttgtcaagttcttggaccacgccatcggcttctcgcagctacgcttctgcctcacagggctgctggtgatcctctatgggatgctgctcctcgtggaggtcaatgtcatcagggtgagggtaagcaggccacctgggccagggtggggtgggaagcagaggctctggcctctgtcctgccctgggttcaggcccccaccctgcttctcagccaaactgagaagggatcagcttgttttacccgcccgtgtaaaggggagtggggccgtggcggaaatttcaggatagacactgcatctggcccacgtgtgctctaccccagggtcccagagggagaggggggtgatgggtgtgttcgctgaggttggcggatgactttccgtagaaagggaagataagcatcaggcactggcctctcctactttctttcttcgggggtgggggactttgctttaatgtattcatatcgtcacgctggtaaatgaatgagtaagtgttttgttttcctttctgtttgctcccgcctccctctctcttcctcaccccagactccaaccttccccttcccctgcccctacctccccaggcagcccagactaatgaactcgtttgtctttcccatgctttgtttttattagtataataccatatgtgtctgtctaaataaatacctattcaggttttttcctctcaacacaagtgaatatgtaggtttcccccacggtatttatcttgtaagaatgggatcatattatgcagttttctgcactgtgcttttctcacccaacaaatatctcttgggactccctccaagccatctgatatggctaattccgttttcttaatggctgcataatattccatcgtatggatgagccataatgtgttcagctatttctctatggatgggcatttactttgttgccaagttcttgccttcatgaataatggtgtgttgaacatacttatatatttatgtattgctgcttttatttctatgggagagagtccaaggaatggcgttgctgggtcaaagggtctgtgtattttaaattttgatcagtgttacatattgccttccagaaagactgtaatctgccagcaatgagtgagaaaaccctttccctgccttccaaccagcagtgagggctacagccctttcgaacttggactgcctgcatttctctgactcttctgcttttagttggtgatctgcagggcacaaagctccttatgtgtccccccatccagtgaccctcacaggaaccctgtgatgcaagcaccatcccctttatagatgaggaaacattttagatgaggcttgtccaaaaacaccttgctagtaagtggaggaggcaggattcaaaaccaggtctgcatgacttggagttctgtgaactgtatatgaaacatggtggtatccttagatctgtggagaagatagcatatgagagattcctgctcctccccaacccaacctaaacccaacccagcctagccatggggggttcaaagtcgacctcaatgagcagttacaaagtcaggatgccctgacattggtggccaagaagtgttggggaatccttttcctggtaataattacaggcgaaagatggccccatctgttagagatcaagtgtggaatatcacaaccccagatccttgctggggcaaggtagggagtggtgagaagttggacttacccatcccccatggcccatgtgccccacagagatacatcttcttcaagacaccgagggaggtgaagcctcccgaggacctgcaagacctgggggtacgcttcctgcagcccttcgtgaatctgctgtccaaaggcacctactggtggatgaacgccttcatcaagactgcccacaagaagcccatcgacttgcgagccatcgggaagctgcccatcgccatgagggccctcaccaactaccaacggctctgcgaggcctttgacgcccaggtggtcagtgggggcacagccacaccatctattcactgccttctggtttagggtcacagagagggacctcaaagggcattaggtcaaaatcctggtgggacaagaggggaaactgaggctggtgaggggaagaagcttgccttaagtcacacagtgaaccagggacaggtgcagggctgaggattcataggacaggcacagttggaatggcccttaccgtttaggtcgtctagtccaaagtccttatccagatggggaaactgaggctctgagaagggaagtgaccccactggactctcacatccctgtgctctttcctctgcagcttactgactataaaggttggagtgttcacttgatttggagcaggggtgttagtggcctgatccttatggtaactctatgagttgagccagacaggaatctccccatatcactgaggagcaaattgaggccctgagaaaggctgtgacctgcccagagctggccacagctggcaggcggcagaggcagtctcctggctcccagtccagtgctccttcacttcctctgccctcgcaccagggcagttgctgaggcagacacggtggcaggtggtaatgagtgagtgtggcacatggccacctcctcattccagtgctgtgctcatcacatagtccctgaccagctgtgtgaccttgagcaatcatctggccttagtttccccatctagaccatgttggtgttgatagggccctcccaactgtgcacttgctgattccatgatctcttcctggagttcacctatttgcagaggatgtgaccactgggtttccccagacaacaggagctaggggcatcctgggaggctaggcccagccgtgaattagccctcaggcactctgacctggccatggtctctctgggcagcggaaggacattcagggcactcaaggtgcccgggccatctggcaggcactcagccatgccttcgggaggcgcctggtcctcagcagcactttccgcatcttggccgacctgctgggcttcgccgggccactgtgcatctttgggatcgtggaccaccttgggaaggagaacgacgtcttccagcccaaggtaggcagccccaggggtagggtaaggcaccctctagatggttttcagttgtttctgagagtgcaacaggccaatgtgtgtgagccatggccacactggagtggctcctcacacatgcgcaaagcccatagcagtatccccaccacagaatactctacatctggtcaacagaaatgccagagggcgagcctatgccccaagggtatcctactctcctctcaccgtcactaccatagtacctctcccggtagttaggtcagtccgaaaactgcaggaagtgcttttgtttgtccagtgtctagagcttctgtgacttggatttgttggctttcagttcatgtcatcttagtaaactctttaaaagttttcaagatctgtcttcttcagtcctgtaaaggctggcacttgagctttctgcaggggcatcttgggagctactgtcagaggagagagaagtgggaaaccctcacgagtggagctttgtctctccccactccaaatttcattcaaagctgcccgtagttttattaatatgttggacttttccattaaaatttcttttttaagaaaagtttccatggcttaaaaaacactggagacttattagactagattatatccaatggccttggcagttgtaacgattctgcaaactgaaatttgttggagctagaaaacctttccccggggttatttgccctgcgtggggccgtagcatccacttcgggggctgggcagactgtgctctgttgtctgtttccttgcagccgtttaggtttaaatggccacaaaatgaaaactttttcacccctaataagtttcagagttttagtttccaagtgaggatgtcattataacattttaaccacagacagtctgaaaataatgcagagaatggggaattagggtttttaataatttatgacaccctttgcgtaacatttgttcatctcatgagctccaaaatcgcagccagcagttaatcctcaggaggtttatgttcatttttctggagacataattagtcagctgaacagttttggccacagatatgagatacgttgagtctgatttatgcagcaaactttcattgaacactgctgtgtgccaggcctgggttgggctgtgggaatatgaaagcaatagttatgatgaggatgattaacaatattaacagccacttactgaccacataatacatacctggctgtgtgcaggagttatccatgtgttatttaatccctaaaactatcctttggcgtgagtatattttgcaacatctttactgtggtatacctcaaatactgtacagtttatgagatgataggtattcttatccccattttacagatgagaaagttgaggctcagaaagtttaagtaattttccccagggtctctcagctagttaataacagaggcagaatttgaacacaagactcactccacagtctgggcatttacagccaggaagctaaattgactattattatcaagccatcacctctggctccaaggattatgaaatccaacagtgaggagagaaatcaaaataaaatacttttatgctatgtgttacatgtgactcttaggaggaatattcagggaattgtgggaaaagatagtgattaacttagccagtggtcatgaacagcttcatagaggaggggatgtttgaaaggggtcttgacggatgagtaggaatttgccaggctgccatgggaagatttcttgctcaaccaagaatgcaaggaccacttttgcttatttaaactttgatggcttttgaagccatatctggctttttgagcctctctactttacctggcccataaaagagaggggaagcggctgcttctcttgtctacaggagtgtcacctttggctctagcctgaccataggctaccccagaatacccccattggcgatcctgaagcagcatggagccagttgttaatatcagggggaaatggcacaggccagagcccttatcagagtgtccacaccacgctcttcttcctgtgtttcccaaaacccttgtgggattctgctaaggagagagctctgaggcaggacgtgccaaagagatggcgaaagcacttagaattttagttcatctgaacgttatcattgccgtttttttctctttgtttatacacaaaccctggggtttattaccgtctcattggaatgctcttgtcccagttacttagcacacaaatccctgagacagatggccctgcctcagtggcagtgggccttatcagatttaatattttttccctgcagcccaaacacaatcagaaaatttccgacacagaaacaagagttgaaagtaaatatagtctccagtgtccgcaacaaagaactctccatcatgtggttgcctgggatgtggcttaattctcatgtgggcttctgagctcagaaaatgggggaaagggatcatttactgagatcatttggttcatctcccagcccccaagccattctaatccagagagaaccgagtgctattctggtctttatgaatgacaaagaaggaagctccctagctacatgttgcagtgtttcacagtctgggagaggaagccgttttttctgcccagcctgaatccatcctgcagcagttggcacagcgaggcacctgtggtttattcatcatcactcttccttcctaagatactcagagttggcaagaaacatgtcatccttggtatccgcaaggacgaacatttctgatgtcctctttagttactgaaagtgtctgtgacttgccagatctttgatgctcctgtcaccccgctgccactccccagggaaagctgggacccaggttgggctctgcctatgatctatagctctttccagcctcctctccaacccaacccctactcccaatctgtcacctcccatggatgccactgatctggctgaaggacaagagaattagattcataatgagctgctggtgtctgaaacctgccagcactgccctgggctatcagttgagccaaaggaagaaggaacagtctgggtttgatcgaagggctaaagcttcaaacagcctctaagtctcagtaggaaaatgtgtaggtttgggagggtgtatgtgtttccgaatgagttcccctaagaactgcttatggttctatatgtgtgttctgtttgtccctgtgtcttttggtgtgtctttttctgcgtgtgtgtgtgcatgtgtgtgtgtctatgcccccgtttggattgccatatttgtggctatcattatgagtgacttaatgagtgtatatgcattggtgtttctgtgactttgtggttttgatgcatgggctggcctcttcataaccatgtccatgcagctggtctggcctagagtacctgccttcaattcactagctccttcttggccatcaagactctgctcaaatgtcacctgctccagggagccttcacctggttgaattagatgccccttatctgtgctcacataacatcctatcaaagcgccctgtttctttccctgacttgatcctctgtcccctattgcctgacctctgtgtgcccagcactcagcccactgcctgacacccaggagatgcacgggaaatggttctgcaaagaaggaataatgcagcaattactatatattgagtgcttacacttactgttttttcacatgcactgttacattgacttctcataacaactctctgaagtcccttcatagcctcaccttacagatgaggaaactgaagctaagagaggttgaggaacttacctaaggacacagtggctaatatatgatgagtcaggacctctaagtccaggctcttaaccaccgtgtcaaacagtcttgtatgaatgggtaggtgtgttggtctctgggtggccaaagataattttattctttacccagggcctcccggggctgggacctacggacaactcaccttttgacacctgccaaaataggaaacaagagtccaagtgatcccctctcctttaagcaccagagaacatgtgaaggggacctttccaatcatacctctggcctggcagagacaatggggctccaaactgtagagtcgggagtgctgggttttagtcctacctctgcagctaactcatttattctcctcagcagtcacattctgcaagcctcaaatgcaaaatgtgtaataacttctgtagaaagtacatgggggcatgaagatcattggcttgattgcttttaaaaaatcggtattgagcactactggggaaatccctggaaacaaacacaattcttccctgagagcttgtgaaaatgcaagactagggcctatgattttccaaagcattttcttccaccaagtgtcaggttgtaggtccttggtcttttctctcttgccttggtacctgcagggtgctgaccagtgctatcatatcccctccccgtttcctaggaccctcttctcggtagactccaacagggcctgccttccttgggcagcatggcaggcctcttggctagtctagtacccacttcttttttttttttttttttttttggatggagcctcactctgtctcccaggctggagtgcactggcgcaatcttagctcactgcaacctctgcctcctgggttcaagcaattctcctggcccagcctcccaagtagctgggattacaggcatgcatcaccatgtccagctatttttttgtatttttagtagaaacagggtttcagcatgttggccaggctggtctcaaactcccgacctcaggtgatctgcctacttcagcctcccaaaatgctggaattacaggcatgacccaccacgcctagtcaggtacccacttcttaactgaaacttagctattccaggttctatcccttttaaaccaactctttgaagagaggtctaataatgacccaatgacttatagctgcagtgagatttttattttaacaggtcacaaaattctcaatccacaaaagtagatttctgaccctaggttattttgttgggggcggagagaggaagtcaaaggttttgcagcctttagagctgcaaaaccagaatttgttgttttgttaaaaatgcacaaataccgacgagtatatttaagtaacacccatagtctaacgaacaaacatgatcagttggcttttccagccctcattctccagcctgtgtgttttctgctcattgtaacacagcgtgtgtgtggcattccatgtttctccagagctttcatgagaatcagtggtcttggatgcatagtgttcccatgagtaccttaattacctaaccattccctgtggttggaaatttatatgggtttttgcattctccttctgctctgaccccaaaataaatgtctgtgttcatacagctattaccttatgtgaaattattttctttgggataaattctcatgatgtgttgttgctttaaaatagtggactccagtctccagagctgcgtctctgcagaggacagtgggacagaagaatcccagggcatgttaaaaaggaccgggtcttcctaaacccacatgcctatatttctgacccagtaccagccaggggggcaagtttccatcccccacaagtcacaaacctgtaactgacactaggatgcttaaggtcaaaggcctggacgaggcctagacagtgggtctggggtagtgtttttgacatcactcaggttcatgttcacatgttgtccccttaccagcatgtgaccttgggccagccactaaccctactgaaactcctttttttcatgtatgaaatggggctaataatggtaccctcctcattagggtattgtgaggatagagttttgcacctgataaatattgtctcctgccccttcctcccctggaaattcaggtctctccctgcagcctaattttaaggcccatttttctgcttccagcccacccctgcccttctaccttcgacctcctccctctgcctctccctctggtgcactggcaaatgggacagagagcctcggtagggccttcctcttagagtcttgcacgcatccctcagtggtctccctgtggctgcttcctgctgccaccaacagatacagacccctgtcgcacagatcatggtagagacagtggtgagcaggaccagacagctccagggagcagtgagggctggcttagagaacctctgttaaactgagaggccaccatcaggaagctctgatccaagatccaggaatccctgactctagggaaaggcctccaatgagagcctgggccctctctgcctgattctgattgtggatgtgccctcaaactccttctcatcactttgttccatccctctttaccctgcagcagctcccacaccctgccaaacaggatgcacagtccagggcagtgtctgagaaagagcagagatctgtcttcatggaaatattgatgtggctctgctggggagcaatggatttatcaagatcaaagttttcctgggagttattgatgcttaatttggaaatagacacactgttgatccctggtatctttagcaacaaagttaaaatgtttgtttttcttcactggttgccatctgagatcttgccggaagtacacaagagaaccttaaatttaacaggaggccctgggagcccatgaggctggcgggcttgggtctgaaatcttttcagtctcttgtaagtgatgagctctcattctctcctgagagctctacggtgccatgttttccactggccttttctgctcagtaattgctacattacaggctgttggtaagttcggaacaagggagctgctgattccatttctgtagcagagaacatgcaccgtgagacttgttgtaccagttcaggttttaggtgctctatttattcttgccccattcagaatgctctcccctgggtctgtggccacaatgctaagagtcatatttatgggcctgcagttgtaattgggccccattctgttcccccaagtggaaagatgaacagggtgtaagcaaccttccctgtagttagaaaaacgtttagttggatttatcagtctgatttttcactcataaacaattgcacaagcctttgcaagcccagagggtcttgtaataatgatggccgtggtccattatggcacagtgatgtgttctacggtggtcattttgctggcaatgacagtcacctctgaacttctctttccaacagacacaatttctcggggtttactttgtctcatcccaagagttccttgccaatgcctacgtcttagctgtgcttctgttccttgccctcctactgcaaaggacatttctgcaagcatcctactatgtggccattgaaactggaattaacttgagaggagcaatacaggtacttggatgattattttttcactttgccataagaaccattattaggaataatgtccatgagtgttattcatcctcatggacactcaagaataattctgctgtaaatttattttttgttgcccattaacgatgttttaaaacagtaaccattgacaaggcagtgtgggatagtggaaaatatcttgggctgaacttgggagacagtgtagctctggctctggttctgccttggactgggtctgaaaatccagctgctcagcccttggcttgaaagtggtagacgtcactaattgatcacagcactctttctgaccaagggtaaatgcaaccttggaatcctctctaagtggctgttccagagttctgctaccagacagtcttctttgggtgtgaaaaaaggaatgtgcttgacatacaaggtctagatagcctctaagacagggtcccctctaagatggggtattggtccatggcctgttaggaactgagccacacatcaggaggtaagcagtgggagcaagcattactacctgagctctgcctcctgtcagatcagcggctacattagactctcataggagtgcgaaccctattgtgaactgtgcaggcaagggtctaggttgtgtgttccttatgagaatctaatgcctgatgatctgaagtggaacagtttcatcctgaaaccatccctctcccccaggtccatggaaaaattgtcttccacgaaaccagtccctggtgccaaaaaggttgaggaccactgctctaagttctatttgaacccttaagtcttgctcactaatgagagtgacctatttggtctgttgggtcacttaagtctaggctcttggtcctgccttctgtgatttccttcttagagtttctggaaagatgatcaaagccagggagtgttcagggcccctctgaagaaggtgatgatgagagttgtccaagtcccagggtcttcactaggattttggttcagctatcagactagagagacatcctgattgagagtagtttaaatgggatagaagtttgtttattcttcagatagagtcagggctgacacaggagctactcaatgatcagagacctggcttcttctgtcatgttgctctgccagccttcttttgtgacttttgtctccatagccatggtgggtattgaaactgccactatatttacatttaaactagccagaagaagggacaagaggagggaacgcattttccttttaaaatggtaatacctgatttgcacataccctctcgcatcccattggtgagaaagtggccaaatggccgtatctagagagtctagaaagagcttggtctttattcttgacagctatatatgcactgctagaaattctctgtgcaaagaggagaatgggcattgggaataactagatgcagctatgcctagtgatgtccatgaagttgtggtaaaatcctgaagctaccttgttctttggaaatgttcctcagaatcattaacattagtcatgtgggagacaggagaagaagctctgcagaaaagggaccgagaggacaaggatatagcttgggctggggacaatgtcagagtccaaactctggctatcttggaatagtctgtgtgaacggtgccctcccaagttgtgcagtgcacaacctgtgcagctatatatggcaaccctgcccatccccagtggtttctcactgggaaagcagagtatttcctcagggatgtcattatgtgacaatagtggaaaaagcccaggaaaatctaagaccttctaagactcatgggggcccagagctgggaggaaccaagctgttgctcagttcagaaaacttctctagaaatcccagcctctcctcacacccctccagtgacaggcagacttgcaccaccacaagcaacagccacttttgtggttgggcagttttgtaattaaatatactaatgtgtgtatgtcataaattacattttccaattatgccaaaagagccaaaaatggttttttaatggttagcatataatcgtttttatcaaattgcttgaatctttcatgttaataagagagattcattactatgccacaaaaagcaaatactggcattaattatagaaacaaattaggggggtggagcgcaatggctcatgactgtaatcccagcgctttgggaggctgaggcgggtggatcacaaggtcagaagtttgagaccagcctgaccaacatagtgaaaccccatctctactaaaaatacaaaaattagccaggcatgttggcgtgcacctgtagtcccagctactcaggaggctgaggcaggagaatcgcttgaacccagcaggtggaggttgcagtgagctgagatcgtgccactatactccagcttgggcgacagagtgagacttcatctcaaaaaaaaaaaaaaaaaaaaagtggctcatgcctgtaatcccagcactttgggaggccaaggcgggtggatcacaaggtcaggagatcgagaccatcctggctaacatggtgaaaccccgtctctactaaaaatacaaaaaaaaattagccaggcatggtggcgggtgcctgtagtcccagctactcgggaggctgaggcaggagaatggcgtgaacccaggaggaggagcttgcagtgagccgagatggcaccaccgcactccagcctgggcgacacagcaagactctgaaaaaaaaaaaaaggaaagaaagaaggaaaggaaaggaaagaaaggaaaggaaaggaaggaaagaaagaaagaaaggaaagagagagagagaaagaaagaaagaaagaaagaaagaaagaaagaaagaaagaaagaaagaaagaaagaaagaaagagaaagaaagaaagaaaaagaaaagaaaggagttagggagaaaaaaaccctttctttctttcttttggagatttccggaaaatgtacccttacggatgagagcctgtgtcttcatgggttagagaataaccacgctttgtgcataaaaagttattaagcacaattcctgaattatacataattactagctgtcagtcagttgtgcatttctgtgtatgctggtcttcacttaataagactttatttcacagatcacttggtgtccctacttcactgaaactaggtgattatcttttgaagtctcatttcacataacctaggaggtatatagatttctttaaaaatgtcattgccattattttaaaccttacccatggtatatataaacttacagaaagacagaataggttcattattttaaaccttgcccatggtgtatattagctcacagaaagacatagaataggttcctgccttaagaaaacctgacccacaaaaaagcctgggtttacacaaaagaggaattaagggcggggagcccaccttacaacagaatgaataatagaattttatccaagagcaggcatcctgaggacatttaagacccggatgcatttttccttgttcaagagcacacatccaaaaattgcagtctttctgcgagtcatgatcactctgcacataaagcgtttaggttcagagctcggggaggccattaccatggctgctctctgtctgccctgtgagggtccttggggtggctgcactctggggatggtgctggggctgactgactcacgcggtcgtgtaacacatcagaccttccaaagtcgaacccttgttttgtttcaaggctcaattatgacaggacttggtctcagagcagatcccctccctaggctggagaaggccactttaaaacagatggcctgccccacttcatcatttttatggctctgatctgtgttctccactggcctctggtaaatcaagaatacaagtggacatgaagatctgctttaaaaaataaagaacagaccgggtgcggtggctcatgcctgtaatctcagcatttggaggccgaggtggatggatctcctgaggtcaggagtttgagaccagcctggccaacatggcaaaaccccatctctgctaaaaatataaaaattagctgggcatggtaggcacgtgcctataattccagctactccggaggctgaggcatgagaattgcttgaacccggaaggtggaggctgcagtgagctgagatcatgccacttcactccagcctgggaagcagagcgagactctgtctctaaataaataagtaaatgaattaaattaaataaaaataaagaaccaattaagtcctgtctacaggaaaaggccttacttgctggagaagtagcttgctgtgctggagtagactagtaagttggaacggtgatacagtaccaccttacagagctgctctagggcaccatggggactgtctgagaagcccctggcacactgtaacaggtggcatctggtgtggtgatgatgatgagaatgatgatgaatgtgaaacactctgctctcatttctagaccaagatttacaataaaattatgcacctgtccacctccaacctgtccatgggagaaatgactgctggacagatctgtaatctggttgccatcgacaccaatcagctcatgtggtttttcttcttgtgcccaaacctctgggctatgccagtacaggtactagatgggctgaggggaagggaggggggcagcaggacacacaaccagaatctgctggtccatggccagtaactaggagcacaccgtcttccactccatgcttgcctgtacctttcacacacttggctataccacaggctgtacctctgggtccctcctgtcccatactctgcaagcactgaccatctctcttaatgaccagagaaggcagtatcattaagactttaaaaatggagccaactttataaactatagaaaaatcaagccaggttcaggggctcacacctgtaatcccagcactttgggaggctgaggcaggaagattacatgagcacaggagttcaagactggcctgggcaacacagtgagaccccttctatgcagaaaaaaaaaagaagaaagaaaagaaaaatcgtacatggaatgcccacagatcttaaaagctatgttgtagcaaaatatttaattacatcaaaaagtgttagtgatgtatttttaagcaaaaagagtaagttacaaatagtatatgttgtatgcttactactaaactggaatatatgttatgtatacatttgtacagattcacacatgaaaaagaattggaaaatcacatagtgggattataagtgatttttattttctttatgtgtttctaaattctctaataagcgtgtataagatttggaaatcaacaacatgatacttttagcctaggcaacaaagtgagaccctgtctgtacaaaaaattagctggaagtggtggctcacaactatagccccagctactcagaggctgaggtgggaagattacctaaagtccaggaggcagaggttgcagtgagctacaatcacaccactgcactccagcctgggcgatagagtgacaccttgtctcaaaaacaaacaaaacctggtgttttttagccagatgtggtggtgcgcccctttagtcccagctacctgggagtctgagatggaaggattgcttgaccccaggagttcaaggctgcagtgagcaatgatcacgcccctgcacttcagcctggacaacagagagactcctgtctcttaaaaaataaaaataaaaacgttaaaacatggtatttttttaaagcaagacaacctttggtgctggctcaggaagaggtacattaccccccaataatcagaggagaatcgtcagcatgattgatctgacctcgggcttcatgtgtcccatctcccacccggagctcttccaccacagagtctgatcctgtcctatgcctgggactaaatcttcaccctggtgttcaggccagaaaccgaaatcccagacccattcccagagggcgggaaggttccaccgggagagcttgatgtagcagaaagtgacttgggtgagacaggctgattcaaatacttaacctctctgagccttggtttctttatctatgaaatggggaggctgcccaccctctggagttgctatggcaattcagttagataatgtaagtaacacagcaggcagagtggcccccagagtcttcacttcgtaaatatcagatccctctaccttgcacatgtttggtatgagtgaggtgttaccaatccagaatccattgcttcttgggataaagattccataaaccttcatctccagtgatttgtattggtcctccttacttgtaaagcttagagtttaaaaatattaaaagaaaaaaaggggagaggctcccacagggacacagctagacaagatgagatgcagggaatctgatgttcttttttatgggaacagtcatatatgccatcccccattaccacctacccatgcccagactgcccccgctccattctgccaagacagatcaatgactataaaagctacaaaagggcctggagatctcatctagtttagttaccaaccaaccttttatgcacaagactttctaagctgggtgtggtggctcatgcctgtagtctcagccactcaaaaggctgaggtaggaggatggcttgagcccaagagttcgagtccagcctgggcaacatagagagacctcatctctaacacaattttttttttgaaacatgaaaaatgaagatttctgaccatgcttctctcattagttaacactttgggctgtgagggtctgatgcagagagacacagcctgggaggatcctaacatgtacacagcattcaaaaggctacaagacactttctgttgtgtccccttgaacaagcagtttgtaagattttgttggccaggcatggtggctcgctcctgtaatcccagcactttgggaggctgaggctgatggttcacctgaggtcaggagttcgagaccagcctgaccaatatggtgaaaccccgtctctactaaaaatacaaaaattagccgggcatgatggcgtgtgcctgtagtctcagctactccggaggctgagacaggagaattgcttgagcccaggaggcggagactgtggtgagctgagatcgtgtcactgcgttccagcctgggtaacagagcgagactcggtctaaaaaaaaaaaaaaaaaagaaatcaggttttgtctactaaacctgctgcacggttaccgttactagtactcacagggtttgttgcacatgcatcgttgctaatagtgctaactaatattaacagcccttgccctatgcctggccctgtcccagcccccctcccttgtataatttaacccttgcactgggggtagagattttcatatctactgatttcttacctttgctcatttatcatggagtgtcctttggttttctgtgtttgtatatacctttaccacttatagatttgaccagcactcaagaaccagtgttactcctgggagttaatacaatcccagccccatggcaaagaaactcatgtggttaggattctgtgtgcagcctggttagccacagggcacgtaaggctttttataatattgacatgagtgcagaagccccattcccgtgtaagccctgagggctcttgtttcataatctttttttggtcacatgcacacagctttattgagatataacccactcatttaaagcatacaaatcagtgggttttagtgtcctatattcacagagctgtgcagccatcatcacaaatgtggaagttttcatttccccaaaaagaaacccgtacccattggcagtcactcctcatcttcgcccccagcccttggccaccgtttatctacacatacttttgaaaggctagtgaaactttctcagaaaaataaatgcttgctcaaacatttgggctataatttcaggggcttcatgggtgcccccctgacatttatcaagaacaccaggttaaggaatttagctataatggaggcctctgtgtttcccagtctcctgggtatcagaggcccagagagggcaggtgccttaccctgggccacgcagtgaaccagtggcagcaccatactcacacatctcctttctgcggttccccagtgacagagttctcaggaagctttttcatttattttctgagaggagggtaggccatcttgtattgatctccaactatatgccagccacaattctaggtgcttatcataaaggttcatttaatcttcacaatagtcctgcagagtggacagagtccttcagagtgggcattataatcaccattttaaagatggagaagctgaaaaccagagaggttaagtaactcacccaagactgcacagcaaaaggctggggctttgaaactcagggccacagactccaaagactatgtcctccccactatgctagatttttttcctaacctgtgaataggagacaaaatagtccttttatttctcacagttgctttgcacactcagaatccatgatttcttctgcatgagggccattcagacctgtgcagaagagagtaatggaccaaggagtcttgggagcacctaggaggaggggatgggggagcatgaggaggagccagggaacagcagcagctgcagcaccagctcccaccccagcctctgccagtctcttggaggtggtgtgggtgcagacaccggctcacaaggtgccctgttagtgagcttggggtgccatgggagccttcttgttgtcaggcccaacccaagctggctgaagaacaccctgatggcctccatttgagcacaactaatgaaggactggatgccagagataagtccaggagggtgatgctgcagggcaggccagggaagagggtacttcatctctatcatggtcctctgcccatccatgccagcatctaacacctgttaaacactgggaggcaggtggtgaaggggccacttcccagcctctaagatacctcctaagccaggaggcattctgtgattaaattacagggcctcccacttactcctttatccttgaggcggtgctggaagcttaatgccaatctggtgtagggctctgggactacaggaccaaggcaagcagtcctttctctctctctctctctttttagctaaggaagccagcacatctgttctttgagaaaaagccctgtatttagaggtgtctgcctttgaaggcaacctgagaaactgtcatcttggcgctttggggactggccatttacacttctcataaatattcagaagtaggcagtcatttacataaagctaaatgcagaaggaattctcttttcagggaatacctggcagattcattaaaaaaattaaagaaaccaagagcataagaatgaaaagcgaattctcggaccccaggctggttttttctggcatgggtgcagtaactttgcctctttgctcagttatcacttttttccaatgacagtaaccataagccctgagagccagcaaatagaacaaaaggtgctgtcacaaacattgtgcaatctcatctctgagatttccatctggaaaatagactggagagagttaaggcttcaaccagccttgcagataaatgcagttagttaccagcccagcaaccctctgcttgcatgagagcccattatgctaacctccttttgaaattgctttgtttctcctccttccctgcactccactccccaagataatttggaaacctgggcaccaaggcttgtcccactctaggggactggggaaacagggattttgccagcacctcctggcagggcaaccatcaggtcaaagggacctgacccatgaccccttcctcagatcattgtgggtgtgattctcctctactacatactcggagtcagtgccttaattggagcagctgtcatcattctactggctcctgtccagtacttcgtggccaccaagctgtctcaggcccagcggagcacactggtgagtgcccaaaggtgtgtgtgttttgtccctcttcccctccttccctcgacagcagcaggtctcctcccacacacccacactgtcattgactttgactttgactttgagtaggccacttcacctgtccaggcctcagcttctttgtctgggaaatggagtcaatgggggaggaggctgcctcccggtgaggacaggaggcgggcatggcagtgacagtattgacactcaggccttcctctcgggtgggagacggagcagaagcctctcccctctgactcggggacccctgcaggagtattccaatgagcggctgaagcagaccaacgagatgctccgcggcatcaagctgctgaagctgtacgcctgggagaacatcttccgcacgcgggtggagacgacccgcaggaaggagatgaccagcctcagggcctttgccatctatacctccatctccagtgagttcaccccacacagccagccctgggtgctgctgcgtacatgcaaggagagggtgtcagagctcgggtaagagggggtgcagggacagaagcaggaggccttgagattatccgactcagtaggggagcctcaaactggctctgatagctaagctcccagaaatcaaagtactcttcattcatttatccaacaaacatgcatggaaagcctgctatgtgctggacactgtgctggccctcaggatacagtgatgaggaagagagatgaagtttcattcctcatggaactgatatgttattgacagacagcagcaagtaagtaaatgaccacagttttgaactctcctaagaatgaagactttttagtaagtcagactgagctgtcattgccctggggaagctacaagaaagcttccatccacttggggctatgcaaaagaaaaagactagttatccttaaatatcagaagcccaggctgaaggtactcacaggtgtagggactgaatttatattaaccaagtagtttgggaaccccaagccaaggaagaagaaaaagaccaaaactggtaaaagtcctagagtcccatatacttgaaaccattttactgagaatgtaaaacttttttttctttttttgagatggagtctcgctctgtcacccaggctggagtgcagtggcaaaatctcggctcactgcaacctccacatcccaggttcaagtgattctcctgcctcagcctcccatgtagctgggactacaggcacacaccaccacacccgactaatttttgtatttttagtagagacagagtttcaccatattggccaggctagtcttgaactcctgacctcgtgatccacccgcctcagcctcccaaagtgctggaattacatgcatgagccactgtgcccagcccaaaagattttttagaaattgaaattttagttatggaaattaattcagtgaacaatggtcccctggtcagagtgagggcttacggaggtcaggtgatccatggagtcctggcccaagtttatctcacagttggtctcgtggctccgtggacccatcccatggtggttacttcccaagtgcataattgggatgtagatatttagcaaccagctgacttcacactagttccctgacctgtccagtctaagagtcattatggccaagtggaagcccctggaaagaagaaaacaaaaaagaaaccaaaacttactcagtgcacaggttacatgaatgagtatagctgaagagagaatttttgaattagaagacagatgagtggggattacacagaacgtggcaaggagagtaagttggtagaaccattttacagatgggaaattaaggccagaggggagtgtgttcctgagatccctcctgaggttagtagcatggctcggactagatcctccaaagtctcttaactcctggtctcaggctattttccacaaagagctgggggcctctgtggggtgaagaagacttaggacaccatggggcaccattatgaggccatttcctcctaggagaaaaaaaatctctgggctctgaaaggagtagaattagggtaggaaattaagagaggctaccgaccacctcctccaactaaaattggttcttttggtgccaggaagagacacacctggtgggggagggaaggtggtaatggagggggtgctggtagtgtctcccagatagacccatccaacaagtctcatggagaatgagacggtcactcaggtcatctgcgtattcttggcattcttgctgcctagagagagagtctgatggagctaggtggccaccaagctgtcccactccccaagacagtttggaaacatgggcaccaaggcatgtccctgtctaggggactggggaaatatcccatagcagtgttctcacagtatggggctggccatgaataccccaggagtccaacctccctttgtccagctagaccatggtgtcctatgcctcaggcagggaatgtggtccagtcatcagtggctgggccgtctgccatacatggtgcaagccatggcgttttatgcagaaagtcctgctagcatttgattttctcagaatggagctgtgagcatggcaggcaaccactgtttcctggattcttcaccaagacaccccaagttcctggtctctccccgttatcctcatccctgaccctgtggttctcagagcctccaaacacactcaggctaagcactccatagacaggggaaatttggaaggaacatctagggagctcagaaaagccaatgtccctagccccaggcccacttcaaccttctctctgtcagtcctgcctgcccctggaggctggttacatgaagagtaaccccctgcttgtgtatagccccccagttttgtacaggtttagagacagttcccagcagtaggaacagctgccgaggtgggagagggcttctcccgatagccgggggacttcctctcccaggaacaacagggtggggtagagcaggcttgtcgttgctgagatagagagagggaagggaaacaacaaggaaagtgggggcactgggtccccaaggttcctggcacagcaagcagtgaagttggggcagcctcaggtcatgtagtgggggcaggtgacatctgctttgactgctcctaagagatatgtactcatctcctggattccaaactgcagcctgggacatgttttcttatataaacagcatcaaaagatgtgtgagttcccaggctagcccactgaaccctacctagtgggtgctcattgtcccccagagcccccagaagacaagccgtggctttgtgatgggcctggggccaggaggacctagggatatgttgtgaagagctgagaagactctggaaaaaaggggctctggagccaagcaggagcccgcccaggactcctcacgtgtccaagtcacctagggagagaaacagagcagcccaggttggtccctggaagagagcagcggaggaggggaaaggggagagcccctggggagagctttgaaagtcaagtgctgtttgctcagtgtgtttgcctttccgaggatgtgtttttttttccctccgttagtcagcagtgggagggggagagagacgggtggtagggtgcagggtacctcctggctgcaggcatatgctttgagtgcgtgttcatttacctcctctggacttcctgccttctgttaccagggatcaagacacaggtcattaggcgtgaggtaatggggcatctcttgttctgacccctggcgccagtcttggagtcctgacgctgcagaggagccccagagtcacatttcctgttggggcccatcctgctcatatgcggcaccatcagacttctgggcaggcaagattacctgtgactctgtctgatggtctcgccatcaatatcactgagagtagctgtgtatggagtcccgaactggtacaggataaaacagggggctgaaaagggaatgaatgggcacagtttctctggcatcaaaagtcacatccagaattgatatttcctgttgagtaaaaatagaaatataagttgctcagtggatgttgagtgagccctattcatgtgccccactctgtgccaagcaccaggaaggagggaagggaaaaatgataagatgttctccccgttctccaggagtttatgctccactaagaagtcagagctaacatgcacagaacagtgtggcagcgagagcagaaccgtgtggccagctccatgcttgccgcctagcaagcgtgattgcacttcatcctcataacaacttggtgaggtgtgttgctctgttgtcccattttacagcagagaggactgactctcagtgaattgaaatgtctcagtgaggtcttccacagcaaaaggcgaagcacagagaaggaagtccatgtgggctgggagttcacccagagattcatgtaggggcaatgtgggctgtaccttgcaagatggtgggatttcaatgaggagaagacaaagtgggaggaagctggagacaaggactgtggtctcttcctttagaagtcagttcaatctttttttccttgtggaagcagcataactctaggtggttcctctgtatctgaggacaagctttgtagaggtgacaaaggggtcctaggtcctatcaggcaagcactcgatatgctgccagttcattctgtccattgtgagatacccattccagagcgcttcctctgtgccaggctctacggaggttctggatgttaaagaggaagcaggcatggccctggccctcccagtcttgtgggagattgatcatgcccatgaatagtgaccatgtggtcagagccacagggtcaattccaaatgcccctgtttctcttttgtgttactcacctgactctgggtctttcgtttcttccattcattttttttaaacaaatatttcctgcccaccttctgtgtgccaggcctggggatgcagtgggagaagcctctgtcctcctcagtggaggcgctaactcagaacaggcagtggagaaaaacaacatgacctggagacctggtgccccttccttccccagcatctttgaaattcttttggttgttgttgttttgagatggagtctcactctgttgtcaggctggagtgcagtggcgcgatctcaactcactgcaacctctgcctcccaggttcaagtaattctccctgcctcagcctcccaagtagctgggattacaggtgctctctaccatgcccagtaatattttttgtatttttagtagagacagggtttcgccatgttggccagcctggtctcaaactcctgacctcaggtgatccacctgccttggcctcccaaaatgctgggattacaagcatgagccactgtgcctggcctgaaattcttcaatatctacctgcccttctgccagttggtgcagccacagtgggctgcttatgcatatcctggcctggcttggtggggagcatggctgagggagagccggggcacccatcaattaaggaggtaaagatcagtctgactgagatgcctcctgccacacttcctcagctgccagcaactgacaccattaacctgatttccttccccctctgttgactgcactgactattggactgaatgggaaacagccccgtgcacctcaaaatgcacttcccctcctgcagatgcatcttgcaattaggcccaaactgtgagcctgcatgctcctcccctggccctgcacaggcaacaaagctgaagttaatcagaggtacaaatggctggctatgcctctctgacacgtaacttctggaacatgtatcaatgctttggaaatgaaaagctcctggtattgcaatgccaggctggtgcccataagggccagaaaacattccttgggcaaagccagggggagtgggtgatctgatcccagctcaggtttgttgatttgttgttttgtttgtttcgttttgtatggggcaagggttgagggtatgaaaaacttacactatcatttactaccgtagtccccagaacccagcacaccagcacaaggcctggaacagggataccttttttgaatgaataagtctttttttttttttttttttttttttttgagacagagtttcactcttgttgcccaggctggagtgcagtggcgcgatctcggctcactgcaacctccgcctcctgggttcaagcgattctcctgcctcagcctctcgagtagctaggattacaggtatgcgccaccacgcctggctaatattttggtatttttagtagagatggggtttcaccatgttggccaggctggtctcaaactcctgacctcaggtgatccacccaccttggcctcccagagtgctgggattacaggcgtgagccactgtgcccagccttgaatggataagtcttaagggatatttttggaaaggatattctaaaaaatacccatgtctctacactattgcagaagggctttcagttttgatggcagcctttcaggccagcctacacgcaactaaacttttccataacagcatcacacttacacaagaagaaggttttataatccacttgccattatttaacatagttcttcctccttaactttcaagatctgagcactataatgttcttctttttgtttttgtttttttctaaatcaaattaaggtgagtcacctcaccttgggcctgagttggacagaaatctattcttggctatattccccacccctccaccaccttggaaccttatagaactttatgtggttcaggaaaatgagggcgaggcctcagatcttcaacccatgacagctgtatgcccagctccctgccttcctgtcttacccccagctagggcacaggactgactattgtgcccagagaggtgccagagcctgtaacaaccccagacttcccaggtccagccacatccaccccagagccccaaaagatgatcttcagagagacctttaaaacacaagtagctggtcacttccatccagaccagaacccaagatggctgtgctcttgctgagacatgttggttgtcattgcctccgagcccactttagccctcagctctgtaccagaaatgctgttcctttgggaatcacagccaaagaagagatggagcagttctggaataagaacacaagttcaaactgtcccatatctccccacatcactatctacagttggtctcttcccatggcgatgtccatctgccaccgtggcactggtattgctttgagtgcaggggtctctctttttggcatgttggccctgttactccctgggaactttgagtcttatttggaatgcgtgaagtccctgtgtccggggccagcactgatccacacagctaagtttgcactcatcttccctctcatgtatcatatctggaatggggtctgacacttgatgtgggacctaggaaaaggcctgaagattccccagctataccaatctggagtggttgtcccggttcttactgtactgtcctctgtagggctggcagccatgtgaagaacagaggttcccagcatcatcttcctacacattattacattcacccatctttctgtttctcacttttatctccagcctgggaaaagttctccttatttgtttaaatccttttgtgcttttagatccccttggagcagtagagtaccttgtagaccataagagtggaaaagggtctagttttctccttgtttctaaagatggggtggctgaaaaaactccccttttttgcctacagcttgcctctctgggcctagaagtggttattctgtctccatattggcctttgatttgtgctgagggtcagcttttggctccttcttcctgagacagtggaaacaatgccagctgtgtggcttctgccctgggggctgggggtgaggctttgggtgccactgcctgtgggttgctggcttaaaggacaattctgttcattggtgagagcccaggccattaacacctacgcagtgttattgaaagaagagaggcgggggtggaggggaattagtctatcccagctagagggagataaagagggctagttagttcttggagcagctgctttgaggagaaaatgtatagcttttgacacaacaggaagatccagaaaattatcattgaacatattaaaggttatttctttttcttgcaaaacacacacacacacacacacacacacacacacacgcgaacacacgcagctgatgattctactctcccagccccagccctgaaggggacccagaactccctgcacaaaggctgtccttcaaggggagggtgaaagaagtggaaaatcacattttcattctttagcgtctccatacaacagccagaactgggcagaagctaattatatcagaagcatactccatgttgctgcatcagctttgggatgttcatttttaaatttatttatagcttgtctcattcctcaaaggagttcagggagctacaaaaataaagacaataaaattgaaaaaaattaaattaaaaaaaccatgaccagggaaaatgtgcagtagaatgaagtgtcaattatcacgttttctgactgcaaaatctcccccacggctgatgcaccatcatttactacaacagcccctcttgttggacatttccagtttatttcgtttgggatggtttgttgctgttgctgtggttgtggttttgttttattgaattttgtgttagctgcagctaataccatcttgctgatggctttgcgctgctcttgaatgattactcaggataaatttcctggagacggattataggatcagaaggtctgaacttctgtgtggctctagctacaaagcaccagattgctttccaagagcgttgtagcaatttataatccaacactcagcctattttttggctgggagtcaagccccagaatgtgaaggaggggtcttggcctggagcaggggctgagggatgggtgcacaggacccctccttattggttatttatggggatgggccaggaggagcagaatagaggcccctgccctcccagttgctccttggagtgactgaccccataggggaggggcgaggctacctcacatttagaactatgtagttggtgatggtcaaggtcctaggtctgatgggcatcctcctccctctcctcctcagccagtaatggctgcactatgtcgtatgtcctagatctgggtcccttttgctgtgggaacaccaataatacttacgctgtttcctgccggaaacggtgcaggagggctgtggcatggtagtgggccctggaaaccatctagccttcatgaggaagggcagttaaagcacaggcatgtatgatgttggtattgattaaaagcctcacgggcagagaaattcgccatctgccagggccccagccatacgagggctccagccatacatcctccaggagactgggacctctccaattgcaggagccttgccttccccatcagattaggaattccccgaggatggggacaatgtccttcccacctgcttgagaactcctaaggggcatgtactctgtctccccattgtatctggaacttcctgggagcatagctcctgtctccgtcctcagactgggaatcccctaagggcagaggccatgtccttccacccacttgggattccctgaagttggggaccacatctctgatgtacaatgctttgtatgtactgactgctgcaggattcttggagtaaatgggcagtcaacttcttggactggtattgaccatctggacttcatcagagtgtccaagactttgccattcattagacaggggccatgtgcacaggcagagccctggcctctggcttctggctcctgactcctggtccctctgctttaatttggctaatggcagaaccagactcctttctgggctgccctggaaggggatccttgaatgaaagaggatagatgggaaggtggcagctgacatggttacctcttatgccatgggggggctgctctctctggaaatttaggcctggggtcagggcactgttgagcattttacaccctaggccagaggaggggtgacctgtggagcagggctaagctagtagcccatgaggtatgatgtgtaggcagcacctggggctcacagagcctgttacccatgttatctcctctgaccttggaaagagctggggtgtatgaacaagtatttataagtttacaaaaatcatatgaggaaactgaggcacggggaaggtaaatgacatgccctaggttacacagcttataagtagcagggattctgcccttctgtcacaccaagtcccactgtcttttcttcctggagtccctgtgactgatctaaaggccacatgtttaacagaataaggaggaggcctctgttgcagcaaaccagctaccccacccgcacacagactctaagggacatcctgctttaagctgtccttagttactaatacctcagtgagaatgagtttgaaattttctcaagagccatgggagactaggaagtctctaagcttcatagagagcctggcttggggggacacaggagccaaaggcagaggaagaagtggcagctttgtgcccccagaaacacgtgctcctgacctcacagttggccacagccagccaactctcccatccttctcccaccactttcccgtggggctaacttcaccctgtccacacggagtgacttaacagtttaagccccagagtcgggggccggggtacctgggacaagagtcctgagggaaatggggtgaggaactggaagtgccacagggctagagttctgcccctagcctactggagctgtgccccacaggctggccccactggactgcgctgcctccaagccatcctgggcatctccatgtgtagctgtcacgctcctcccactaaacgcctccctgtgcttcctctgcagttttcatgaacacggccatccccattgcagctgtcctcatagtaagtggatcctttctccatctcttgggggtagggtggagggggagggcgtctgcagtgacaggctgcccagatttggcctttctgcacaggggcctcagaagacaggctccacagccagactgaaaataggatcgaaagtttatagagggtgtggcccctccccaactccagccgaacaggggcctctgcctccaggcctggaagaccggaggcttagtatttagagaaattaaactttcttttaaaaaatagctatccaaatttttaatttttaaagtgaaacatgtgtattgtagaagtgatgggaaatccagaacagaaagctcaaagagaattaaaatcacccataatcccactggtaacatttttaatgtgtttctttccagtctttttttaaggcctatgatatgtcattttctacaaaaataggaatgtgctatgcatgcagttttgcaacctgctcttttaaatttaggaatatgccacacacaattctccatgccactgaatattatgatggtggctttctaaagcaattttgataaaagctgtgtgtgagctgagccatgggggtcaagcagcatgctcctacagaaaggcctgggcccctacgagcctgcagccccctcacccagcctcccatccccatcttctgtgatggctgcagttccttaaaaagatctgcttatttcccccggggccagtgtccctgagctgtgtagagttcacagcctgtcggatacacttgggaattcacttccaatgtgatgtattgagctggttcctggcctggctcctgggggaactgtgggtaacagaggccactgagccagccaggtggctggggcaaagcactgtgcagtttcgtaatcactctgtttacgttatcccgatgaggactggggagatgagcaccccgcctgctgtctgcagagggggccgtgctgacctaacccgagatctcctccctgcttattcccagccaagactgggcaggacagggagtcttggccaggacagggagggagcagcccctgctctccagcttgaagtcctgaacttgttggggacgtttccatgagatgactgtggggatgatgaaggtgtctccaactaaaagatcctcttaggagcctgctccctgacagccctctcatttcccttccagtgctgagcgtttccagtgtgggagggacccacaccctgggccaccctggcctcacttgtgcctctgtccacagactttcgtgggccacgtcagcttcttcaaagaggccgacttctcgccctccgtggcctttgcctccctctccctcttccatatcttggtcacaccgctgttcctgctgtccagtgtggtccgatctaccgtcaaagctctagtgaggtgaggggagggtccgggcgagggcactgggcaggcaggtcctgtgtcagcctcaaggcttgctcgagtgatggccaaaccacagctgtttggtcccggaacacacccccattgctgggccttgctgtagctggtcctggttggtcagagggacattggcctgtatggtttcccagctcgccatccctgagcaaggacttgcttacatacctcccaggagaggggactcactgtcactttcacgacaacttaaaaaaaaaaaaaaaccagtgttgagccaaatgtggaatcctcctaaattctacccactggtcctaacttcaccctccagagccaccaagaatgaggccatcccgtccccacgtggctgccccatggatatcagaaggcatccactgtgtctatctttcccaggccaagtatcccctaccctttccacagcccctgagccctcacagcctcagccagtgaaacagcttcccccaagcgctgggtcctgctctgattggcccacagctcttggaggctcccacttccaggctctagagcctcatggggactctgccactgtcccagaggcattgccctcttgggaatgaaagcctgaaggtagaaggctgaggctttggctgggaaatgccctgtctggagtgagaagatgtccttgggcctctgaagtagctctgcctccttgaaagcaagagcctgtcatgcctctatggagggctggcttgtccttacccatggccagagaaccagtcagtaacaaatgtcctctgtgtcttcagccttgaggaaggtgacacccctgtctcatgggaccctggcaggtactgggaagctggaaggaaggagtagctgttggaatgaagtagctgatagagagggtagcttgcagggggagactctagcatgggttcaaagatggaatggggcataactcagcaaaattatgctctaaggagtatctgaccaggcagtagctggttaaacagggattagctcccatttccacagtcggctgtgctgactcagtttcttgaccagggtgttgtggggtctgaagatcacccctcctcccaccacccactctccagccctatgattctgtgtagaaaccacagatttaagaacgctgcacctgcctgaaaactgttgcactgatcccaaagcgttcatattttcaaacactctggatcccactgtttccaggaatggaacaccagagtagcagaggccttttcagtgaggcagctcaggctctggctgaaggtgggcgcaggacactacctgaagcttcaccccaagagatgagggccagctccactcttcccagtcaccgcctgtgggggagggaggctggacagggcatgaaggcagagcctggtggtctgcccctcccatctaggggtggcgcacagaaagggagactccaggccacagctcacttacaccccagaataaccttgccttgagggtgggatggcttgtctgccccaggcctgttggacatttagcaaaagagaagaaaggggaatacaaacaatcctgagcttcccagaaagctttcacacctccaggatgggagagaatgaactagaagagtgaagcttccagtgcttcctcaggtccacagggaaatctggacaggggagagggtaggaatagccgcctcccccgtgagtaatgacacctcctccagcaggctgttatggggatccgattacataatgctacaaaacagttaacacagtgtctggcatttagtgtatgctcacaaaatactagctattgattctttaccaatcctagtcctaactaaccttaaccctgaccaatccaacaccaaccatccttcagtctaataacccagactaactaacttcaacattaaccctaaaactaaccaatctcacctccaatccagaccccagcctattccagctgactggtcaaccctagcaaaccctggtaacaccaattacctgcccccatgcccactggtctgcccccttcagtgtgggctttgtgggactatacttcaggcctgagatcctgctcagagctctctatcaggctgcgccctctcccctcccctctgcccctggcaggggtgaggggtgtctctgtgcttcccgagcagcgtgcaaaagctaagcgagttcctgtccagtgcagagatccgtgaggagcagtgtgccccccatgagcccacacctcagggcccagccagcaagtaccaggcggtggtgagtgcccggcctccccttgctactcccagcatggtcctctaaggcccaaaacttgggcctgctgtgtcggacttctgccttttttcccaggaagaggggctcccttccctacacagctcccagcccagtgggtcctcacctccaaaccacccccagcccctcagggttgtgaaccgcaagcgtccagcccgggaggattgtcggggcctcaccggcccactgcagagcctggtccccagtgcagatggcgatgctgacaactgctgtgtccaggtgagtcctgctgccccatgcctggccacccagcaccaactcccagagggagctcagcacctggaaagccagaaagctgcatgcttagtcctctgcagaggtcaccctgcctgcctgtacggtccataggagtccagaaaccagggaccaccaagtggggggacccccagccttaggcaagggtcagcatgagaaggccagtctcccactcccctgctctggaagtgatccaggggctggaatcagtgtcttttggctttcatggaggaggggaagccagagactattcactgggaactggctgcctttctgttctctcctgggcggtgggacacgcctaatgaagatcatgggaggctacttcacgtggaccccagatggaatccccacactgtccaacatcaccattcgtatcccccgaggtatggcccagtccacccctccagcatgcccctccccatgtcccactgaataacatagagataaaaagacaaagctgcatttattgagcacctactctctgctcattcttggtgtatgccctgggtatattatagaaggggaaggctacattctagaggcttccgtgtgctgggtgggagtgaagcactaaggacagggtaaaattgccagccttaatgtcaaaccatccattgcagacagtataggtaatgcacaaaaagatcagaagtgggtagccaaggaacgcaagtggaagtgatggggtttctgagaatggacaaaggccctgaggccatgaggcaggaggattttctggcagaggcagccatgagcaaagtatggaggtgggttggaggtgggacccaggatggtgtttcttgggaccacaaggagcctgggctcatactaggagcatgggaaaggagaagcgagtgcttaggaagggtggcggggcaggaaatcagagagggggaaggacctggggagccagaggaggatgttgatttccagaaggaaaggattaaagagggagaggacttgctggggattctaggtaggaagaaagaaaacaggggccccagggttgggtgcatctgtctgtctgtctttctgggtaatggttgttcagactcccccggccccactcacatctgccaccctccctccctgcaggccagctgactatgatcgtggggcaggtgggctgcggcaagtcctcgctccttctagccgcactgggggagatgcagaaggtctcaggggctgtcttctggagcaggtaatacatgtatcctcagggcccagtggaggggaaatctccttttaaccatcctcctcagttgaggatgcacacacatttattggagggcccactctgtgttcagtgaggactcaataaatgctgctaatggatattctcatcatcatcactagtacgtattcacctcttactatgcgcaggttctttgctaagtcctttgcatgcattatttcatttaatttttatgataactaacaaggtccatactgttctcaattctcatttatagaggaaggttaaactatttgtcctaattcacacagctaataagtggcagagctggaattgaaactcagttctgtcagactctgaatcccatggttactcagatgcacggcagtaatttcccagtgtgggaaattgcaacaccaacattggtttccagcttggtcctgagctgcactgacctacacaccataagtgggtgttctgaagatccagatgtaaccaataaatgttggtttctgggcaaagatcactgtcttaattaaagagccagaaccccaggctcagtcaatcacgaatctgttatttatacccacctacttccaagaagcacttgaaactagttgatgaaagattcatgtaaaaatcaaaaccacaatgagataccatctcacacccgttagaatggtgatcgttaaaaagtcaggaaacaacaaatgctggagaggatgtggagaaataggaacgcttttacactgttggtgggagtgtaaattagttcaaccattgtggaagacagtgcggtgattcctcaaggatctagaaccagaaataccatttgacccagcaattccattactgggtatatacccaaaggattataaatcattctactataaagacacatgcagacgtatgtttattgcagcactattcacaatagcaaagacttggaaacaacccaaatgcccatcaatgatagactggataaagaaaatgtggcacatatacaccatggaatactatgcagacataaaaaaggttgagttcgtgtcctttgcagggacatggatgaagctggaaactatcattctcagcaaactcacacaggaacagaaaagcaaataccacatgttctcactcataagtgggagttgaacaatgagaacacatggacacagggaggggaacatcacacactggggcctgtctgggggtggggggcaaggggagggatagcattaggagaaatacttaatgtagatgaagggttgatgggtgcagcaaaccaccatggcatgtgtatacctatgtaacaaacctgcacgttctgcacgtatatcccagaacttgaagtataataaaaaaagatgcatgtaaaataaaaccctttaaaaaggtaagaaaataggaactgagaaatgaagagggtaaaaagatgttcagcaacctgggcagaggacaactacagccatcaacataaaacctggctctgtgccctctggtagccaagggaaaaagggatctctgggctttggagtattcatttaggaataaaagttgcagccaatcagcagaagggcaagctttccctaccaatcatttctaggggaaaattattgaaggtgtcaggtttttcataagcatgagtacagaactgagcagggagaaagactttgggcccaatgtctgaatatcaacatgcacccccgtttcctgcatttccaagatgtccctgaatggtgtatccaaaagatggcaaatttccctcctcagtggggtcgtgggctagcagatgagccccttgggtttcccatcacctcccatcagggactgtgatgtctttgggggcagaggggtctttgcctccattcgccattttatttgggagatttttcaacatagcctgactgggaaggcccaggtattcggtttgagatcatattgccttattccgactgcctctccagcctttggagggaggagcccttttctgctgtccaactgcatgcctgcagcaagaagacaagagtccccagtgcactgtgagctgaagaaagtaaccaatatttattgggtacctcctatgggccatgccctttgctaagtgcattgtcaacatgatctcatcaagcctcctactaagtttaggaggggagtgttgttaccccatttcacagaagcagaaactcaggctcagagaagttgggtgacttactagtcagtgtgtggagcagagactctgcccatgttctttccctcaaacctggtcactgctggggcccccagggcctagtcctaagggttattgtccaagccccatgtagtggtcaggctggatctgggctctcctccaaggcagggcttttccagaaggattgcagggctcagacactggagctgcccctgccttgacctgctcagcatggatgtcaaaacccactctgaacctggtccctttgccctgctttcttctcctcccccaccctcatgccctcatgtggcatcgtgcctgcctcaggagctctccttgtcctatgtagatgaagcaggcatgattggcaggggtctgctctgccctgcctcagtccccacctcttctccaagctgtgccaaccctccgggtctgactgctgcccctctctcttaggaaacctctgccccagcccagggaacacaaggagcctctccaaggcagaggaccctaagcacttcttttttttattattttttattttattttaggttctgagatacatgtgcagagtgtgcaggtttgttacatagctatacatgtgccatggtgctttgctgcacctatcaacctgtcatctttttaagccccacatgtattaggtatttgtcctaatgctctccctcctcttgcctcccaccccccgacaggctcggtatgtgatgttcccctccctgtgtccacgtgttctcattgttcaactcccacttatagtgagcacatgtggtggttggttttctgttcctgcctaagcacttattataggccaggcactgtgcaggcacctcatcatctcagtcagtctgcaccgaactctgtgcagtagatattattatatcctcatttatcagattaggaaactgaggtgaagcaagttgtccaaggccacccagctgttaaatggcagaagtgggatttgcacctaggtgctcaagtgcattggtttgccaccatgtgctcaaagagaaggggcacaagagcctcatgaagaaggcatagctagcctgacagtccaaaggccagcagccgctgtggccatgactcacacacacctgcctcctcccagaactgccacgtgggtcctcacagctctgtccttatcaacacttactctcctttacaggtagcctaggccccagctcccagctctgttcgaggctcgcagaggggcggtagtgaaggggtctcatttctccaggatcctctttgctctctcgcccggtcctggtccagcttccctttcaagcatagtgaagtgcatttgttagcttgcagccaaccctgggaaatcatgagaatttgttcccaagtcaactcattctccagcgtccacagtgacgtattcactcacccagttgagcgcctagtgtatactagaccctgtgacagcaacaggagtgcaaaggtgactaagacgtggcccctgctttttttttttttttttttttttgagacggagtctcgccctgttgcccaggctggagtgcagtggtgcgatctcagctcctcacaagctctgcctcctaggttcaagcgattctcctgcttcagcctcccaagtagctgggactacaggtgtacaccaccatgccggctaattttttgtatttttagtagagacggggtttcactatgttggccagggtaatctcgaactcctgacctcatgatccgcccgcctcagcctcccaaagtgctgggattacaggcatgagccaccacccctggccggccccgcttttaagagaggggagagaagacctgggccttagaagagctcagaggaaccacaattgactctgcagtcaaggagaggaggctcactgcggatgtggtatttgagccttgaaggatgagtgtggtttcatcaagtagaaaaggcagggatgggaaagggaggtggtccaggcaggggtgatggtgtgggcaaagccttgctgatattaaagaacatagttctgtgcacctggaacactggatgcatggggtgcattatgaaagatgggactgaagaagtgaacttggcttagatcccatgtagtaggtctgagaagtaagatttaacccaaaggttgcaaaagaaccatgcttgtgataaaggatgatggattggggaaacagagaaaaagacagacagactgtaggaagggaggtattagcaaataatcataacacagtgtgaggtgtgcattaatattcactcattccaagtattgatcaagaagagaggtaggtactgggttaggaaacagcttgggcaaatgcatggggaaatgagagatgtcaagatgcattctaatggcagcctcttgaagatcttaagttgtttttggttcactcatttcgcaaatgaattcatttagcaaaagcactatggatacagtgcttacctctaggaagtaagttttagcccaaatgctgcagaaggatcatgcttatgacaaaggatgatggactggggagagagaaaaagaaaagacagacagactccaggaaggaaggtcagtctgcagctccttatagtggctaggagaaggagtctaggcagatacgactcaattagcttcatctgctgtttgtctctcaaaatctagacatgtgcactgctctggctggcccacctatcctgggcattgagttaagtgtgggggctgtgtgttgagagtccccctccattactggcaggaactccacacctcagacattgagccccaggtctgcagggagaagacgtgcttgcaaagtgagctaaaagcaaaacagcctctgacctggcaagcattcccaagtctgcacgcctgcagccagaggagagggtgatgccaggctgctgctcagatgcttttcagccatacccaggccaagacctggtgaccaggcagccagaaggagttccaggaggcacaaggcaggaagttgggggattaggaggtgtagaatggagaatgctctggggagatgggtgctttgttggtgcaactattcgtttattcctccagtgaccacgtgagcagtatggctgcacacacaggctctgcagccaagctgcctgggttcacatttggtctctgtgctttggaaaatttcataagctttctctaccagtttcccttattacccatgagattgatgtgaggattaacctagcatgtagtaaatatcctataaatattattattcaatagtgtacttctttgccaggaacaaaattcacctgttcctctttaaatgtcctccagtctgtctcctgggaaagattcttgtgagctccctggggacagggaccatattttgtttgtctcactgtatccgtagtgctttttgctaaacgaattcacttgctaaatgaatgaaccaggaacaacttaagaccttcaagaggctgccattataatgcatcttgacatctctctcctttccacatgcctttgtccgagctgtttcctaacccagtatttcactacccctcttctccatcaatatttggaatgagcaaataccgttagtgcatacctcacatggtattataattatttgctaatgcgtctgtctcctccatgactctgagctccttgagggattattccatgttgtaccccaggtgccccatgcagatgtgtattttgtgcactgttctgtgtaggctacaaaggaaaaggcctagcacctgcccttggggagctcacccacccaggatggacagaggtgtgcagacagagctgcagggtgggcacaaagggtccatctgctgaagtcctgcagatgcagccccgagcttgtccctcacgtcagcagcctggctcctggtctcagagagaactgtgtggttcccaagcattcactttaggaagaatcacttgcccctccctggctctctgcttcaaggaactgtgacaaccttgggatttgcaaactctctctttaatccttaagaggaaaatgttttggtaaaaagtcaagattagcagatacactcgggtgaaattctttccctggaaataaagaatagagccattaatatccacagtagagtgactttaaatgcccccggggggtcagcaggaaccagggccctgaggaaaggatcagcgtggggaagaggctcccacttccctgtgaggagctgcacatgcagtctcactggagctccctgctgcaatgctgttgcctgtggtggttggtgtggatgctgcctgccaagagccctgattccccaggaagagagaaaaaggcttctctcaggacggccctggtcgcatctgcctgtacaattcctggagcctttggggagctgaagtcaggggctcaagtgcccctgggtttcctggaggaggcaggtgtggtgagacagctgacagacaggagaagggatgctctgaggaagtgactgtccagccatgggaaccagatggcccctggctgtagtcctgatgctgccacttgctagctctgtgaccttgagcaggttacttcacctctctgagacagactcactgtctggacaatgagtaaaaccctacctttcctgtctcagagatttggcaatgggacccaatgacatcaattggaaaggatgctgtgggtgaaaggtaacctttcaggacagcgacaagcctgtctgggcaggatgaatgggctgtggagccctgtatatcctagctcactctttgaacctcagtttccacttcttccctttttatttattgccggggtcttaaatgagtgttgggggtatctgattctccctctgcctgtacttttggggccaagcactgagctgaaaagacaattcctcctagttctccaagcctacaacctgccccctaaccagctgtgagctgtaatacattctccagtgtcactgtgaggtttgtgccttcacccccattttatagatcaggaaacagaggctcctccaagtaaaggagcttgcctcagatttcacagccaatgagtggaaaagcctctgggattcaaatgtcagagcccatatttttcctacttctcgcacctgttatcatatgctgcctcttcctttaacctgcagttccctcccttcacctccaccgtctcaatccttcccactctttaaggttcagttcagctatgacttcttctatgaggctctactcattttctcagatttcttcctcctccaaatttcttgtaaaaattatgttttttctctgattctaaaagaatgcacattacattagaaaagatacacaagcatacagaagataaaaaccacctaatatcccatcacccagaagcttccagtttttctttatgcatttgcatatgcatttgtgtttacttttccccaaaagttctccgatactttgtcctacttttcttttgacccttataacttcctgacttcggtacctttctgatttgccctaccagagtgtgagcccctggaaggcagcctctgcaccctgattcaggttgccacacatatgccagctcctagtgggctggagggaaggacatgcggttggggaactggaagactcatgctttcagctgtgtgcttcctccctagagtgcaggcagaggaggaatcgaatcccctcagcactcttgtaaagaccacagcaatgagtgagagatggtgcctgccagacataccattctttacttttcagcttaaaacagatacaaagtttggggaggctcactggaggaggcttggggctacactggaaagagaagaacttggattcacaccccagcttcccctcttcccagctctgtcacatttgcaaactctgagtctcagtatcctcatgtgtaaaatggggatagggtttatagggttgtaaggatgagatgatgagttgtttgcaaacaacttctcacagtgcacagtgaaggtcagcaatgagagccagccccgccctttcttctttccaaatgattaatatatctgttaccagcctccattcattatatagctctgtcatgtgctaagcaccatgggggctgaaaaagatgttcttcctgccttaaaattccactggggatgaacaaattacacgggagctgatcagagaggaaggcagtccattatgagggctaattgagcagtgcagaccatgttgcaaactgagttagggcctggagagcttactgtgtgctggggtcctcaggaatgccacagatgcatcaataaccacctctgctactctggaagtagtcacatcaggaagactccagagataagcttatctgggctgtggccacagagctggaatttgtaagctttaggtttctatgtctcatgttaccagcttgtctataaattgtaaattacagccatctgatggttagggaatatgaagtttggttaagagaatgaaatgagaccacgaagattagagaacaggaaaagaggggactggggactacatacccatcagaatcttcattcagtcctgaccctcagcaggagggggatttcatcaggctcatttccatccttgatttcgtccatcctggttctcctgacaaggggcatttatcagagttatggcatgggaaatcacaggggagtaatgtaccatggcatttaagagtatgaacgttggagtcggagctattttctccgctacttactagctgtgtgactttgggcaagttacttagcctttctctgagcctcactttctttatctgtaaagtgagggcgatcagaataaacctccttcatatggttattttgagctttataaagagacaatactggctgagcacggtggctcactgccagtaatcccagcactttaggaggccaaagctggaggatcgcttgagcccaggagttggagaccagcctgggcaacatagggaatgagactcctgtctctacaaaaaatatacaaaaattagtcaggcatggtggtacgtgcctgtaatcccatctactcaggaggctaaggcaggaggatcgcttgagcccaggaggtggaggttgcagtgagccaagatcacgccattgtactccagcctgggcaacaggagtgaaaccctgtctgagagagagagagagagagaaaatactactatggtgcttataaaagttcaataaattttagctgttgttagtattattaaagtaagatctgtatgaaaataaagcagattttttcccccaaatgttcatgtcagaagtatatatttcattggcaaggggctgcttctggaaggttgagaggtatcctgggggaggggatagagcactggcaaaattggcatcacaattcaagtcacctcactcagtgttttttaagttatcaaaatccacagtatgaaaagcatttgacattacagtccactatatttatgcatttataaacaagagaaaaaatcacgaaaaatacagtaccacgtgcagtacacactgattccatctattctttttttttctttttcctcaaatgcacttgccgcctacttattccagacccaatgattgggtccctatccacagtttggaaaacactataagaaatgattgtgtcctctcactttccctctctgggatttagttttccaactataaaatgctcctgatgcccagccagcctcaccgctgctccgagtcaatgccaggaacgctgatttagcacatgctatttggagggtacccatccaggtgctgtgggagggacagagattgagaagagtgctttctgaccccacagaggccatttggaaaccctgggaatgggtgggagggttggaggtggggattgcttctcccctaagactcagcgtgatggaaaggcaatggggtgggaactaactggtgttggtctgtcccatttgtgtcccagcagccttcctgacagcgagataggagaggaccccaggtacagccttgggactgggtcagaagtgggtctcaacaaagggaaggggtagggtgggggtggaggacttgtgggtgggtaatgctgagtatggattcagggatgtgcagcctacatattttcagagacatggggctaaggcctgcattctcaatgagggcaaaatttggttcttggggacagaaaacacttagacattgcaatgctttgtggctgtccaaagtaccaaacagatgccagtatatctgtggtgctgaaatttcatggtgaatggagtcagaaaatagactagcgattgccagggtctggtgggagagagagggaagggactgccaatgtgtatgggatttgttttggggaagataaaaatgttttggaattagatagtggagatagttgcacaacctggtgaacgtacttttagtttcagaggttttctaaacctctgatttttttttaagtgacaggaaagacagaaaaaagtatatctaaaaaggctctaggggtgatcatggaaaagaaagttaagaaatatgactgtaaggaaaggagatgggtgtccctcaggccaggcagaaaattcagtcttgttgctttatgttcatgtgcaaatctaaaaaatccaagtgatatagattaatgaggctctgagtccctcaaaaccttccctccccttacctctccaaaaaacacttgagataccctagaggtggtatgaagtcaggatgggaaggttggctcagctttgcaaataagtttaagcctctggcctttgctctccaacaccaaagaggcttcactttggtatattttctctgccctttctccctccttgtccccaactgtcagtatgtgatgacaggctcagcctctgtaatggtagtgatcatatttcttgagccaaaaatcagacctcatggcatgtgacaagtttgcatatgtggatgagaacagagtggcagaatatttgacacgggagcagcttgggcagtccagggcacatggcactgcacctgacatccctggcagatcccccacattccgtggttgtcttctgatggggccatatggggctgcagatcatgcctggagccctcgcagctccagggctgcgggttcccagccccagagtgcaggtgctggtgtcagcctgcctggcctggcctggctctgtccagagcactccttgccccagctgtttgtgcagctgtatcagcctcagacctcagcctattcattccaacctgaatgcagaggctgggtctggaggagccacattgcgggcttcatactcctgatctgacaagttttccccccagagcctgcaccaatggcacctctccccattctccctcttaactgggtcctccagggccctcctcacacacccacgtggtcaggcagcagaggcttccccaagatgggcacaccccactctccacacctctctatgcagcatttgtggctacagactgggtccaggggattgtaaaggcatgctcatgttgggttggagggagctcaggatcttcctggaggatatggttcactcccatgagagctcagtatgcctttcctcccctgctgcagcccagagcgggagacagcgaccgacttggatatcaggtactgcgtcctgggaacattgccccccagggtcaactccctccagggtgctctcaggcccaagggagccacatcaccctgctgggcagcccccagaccccagccccagtgttgggggaggccagggagggcccctgtgctccaccaggtggctcgggagctgctgctgtttctgtgcatccatttactcccttcacataagatcatttttatctgggatctctttttcttttttcttcaaaaaccacatcactcaaaatgtggcttccttggctctgcttttaaaaaaaaaaaaaaaagttcttccatttggagaattacctgctgacttcaaagtccagtggcttgagggctacccaaagagggaggaagccagaagttgagtgttcccttggtttggtcacacttttgggctcctccctgactaaggaacaacagactgcagggctggggcaggctgggtgtagggcagggaggggatgaggtcctgctgccccagtcagttgagacccagacctctcaaacctgcctgggggaaggcaaggccaccagaggccacactaagcagatttctaccaactgcacctccccatccccttgcctccatctgagccatcagcttgacaactgcctctgagaacaagcccctgagaatgccttccgcaccccctactcccgccctgctttttccaggaagagaggccccgtggcctatgcttcgcagaaaccatggctgctaaatgccactgtggaggagaacatcatctttgagagtcccttcaacaaacaacggtaaaagcctgtcggagggaggcaggatgtggaggggaggaactgtctctggccagcctgccccagttccgggcccctccatcgatcacccacacccagccatctcactccccaggtgcttacctgcactccagcctctccatatggtgcacctggagaggggccaggtgtgcctgagcattggggcaatccagctcccataggggagagggcaggaatggagggaagggagagagccccgctgccttttctctagctggtgggagggctagctagctctctctgtgagtctccattcgcctggctcctgcactattttccctccaatgataatagttagggctagcatcgactgcgctcttactacataccaggcacagtgccgagctctttgtacacggaatttcctctcatgcttacaacaacctcagtaggtagatattattgttattcccactctacagatgaagaaccaagtttcagaaaggtcccaaggccacccagccagtaagtgaccaagatgggtctcaaatccaaagctgcctaacacctaagtacatgtttgtcaccaacatactctgatgcctccatgaactctggctggcacctgcccaggctaagggctggctggggaagtatgagaggaacaggctgggcaaatatttgaccagccatcatcattactgcctaaaccaaccagcagtggttttccctgcagtgccccaagcacgggttccggctgcagcttttcccactgcacagagatcatgagcgccctttcatcacttactctgcatatttgttcccaaccaattccatccttctagtatttaacctgcccaaacgctgtgtgaagtgctgacctcagctcttttcaagctcacacggtgtttgcttgcacccaagcgggaggcctattaaagccattgctcaccctgggcatagctacccagagactaatgaccctctgcaagtgctcgggccaactctgaccaggctgaccagctgcatcccctgcctctacccacgccaggtacaagatggtcattgaagcctgctctctgcagccagacatcgacatcctgccccatggagaccagacccagattggggaacgggttagtagcagcctctgaggggttttttcaaagccaggacccccaacctaccatgccctgagacactactcaggacaatgggtaactaggaaataggagacattgaaggctgaagagttgcctgcagtaaggtcaaacatgttgttcttgatgatgtcctttgacaggttttcagtcctgcttggagggcaaggtcagcttagtgccctcccaggctggggatcttcttcatttgcaccccaggtatacactgagagcccacacagcactgtgctcagcctggggttgtattgttcctgttcatcctccagatggggtcccctccacaagcttagacgaacaggattctcctgtgactgtcctccttttgtgtgattttaatccctgctgcctctgtctttgtttgtactggtcagatggtccctagcgcctacacaatgaatctttaaagacttggggctcatgctgccctcttctgaatgaattcagtaaacacgtgcaagttccttctctatgcaaggtgagaagcaggcaaagaagtggatagagccaggcctccatcccaaagagctcatagtccagtagggtacaggacagtgtctcctgaatggctgagggcatgatgtgttcctcctctttggtgacagggcatcaacctgtctggtggtcaacgccagcgaatcagtgtggcccgagccctctaccagcacgccaacgttgtcttcttggtgagtgcaagttcccttggggtcctggtctctggctgcctcccaggcctaactgcccacctccacctccccgcaaccccaccatcatccaacaatctccctctccaggagtaaatccctcctgccagagatattgccttatcatcctagtgatagggaaactgaggcaggcaaggatagcacaaatgacccattgcagacttcagatggagctctgcagtagccaatgaggagaggcaagctgtagttataggctgcctgtctgtgggacagcccaacccctcaacacttatgcagcccgactataagaatggctgataacagaatgtgtgctgccacttcccatcttatgcccagtgcagacattgctaattgttcacagcattatttcccatggaacttaactcatcctcagaatccttctcaacacagcactccaggtaaccactagccatcaaacatgagataaaactaggccaggcgcggtggctcacgcctgttattccagcactttgggaggccgaggcaggcggatcacgaggtcgggagatcgagaccatcctggccaacacggtgaaaccccgtctctactaaaaatacaaaaaattagctgggtgcggtggcgggcgcctgtagtcccagctactccggaggctgaggcaggagaatggcgtgaacccgggaggcggagcttgcagcgagccgagatcgcaccactgcactccagcctggggacaaaccgagactttgtctcaaaaaaaaaaaaaaaaaaaagaacgtattcgcaatccttacactacttcatgtcaagttctgttgtgtcaggtgccttgactgacactgaagaattctaagaaccagtccttggcctcaaagatttagaatctgattagggagacagagctcacccagttcaagaggcccagcccggttcaaatccaaactgtgcggcataaactatgagggggccttgtccagggagacaactgtgagggctggagtaatcagggagggcttcctggaggagagcctcaaagggagagtcaattaaacagaaggaaagagggaggccatttgcacagtgagttggaagaaggaagctcaagtctctgattccagctttattccctcccctctccctacaccacacgcacaagcactcctttactaaagacacttcacagtgggaagattcagtctccgttaccgtctgacacacacacagcgttttacaaagcatgggtgcattcgcgatctctcatgagatttaaacaaccctgctagagaaaagtgaagtggacattttatttcagtaaacgtttatgaagcgtctactctgtgccaggcactaaacgtttatgaagcgtctactctgtgccaggcacaggcacaagaagtctcagttcttgggagtgccataatcaggaatggacaaacaatgatcagatctggctttgcgccagtgtcacgggaatagggaggaaggaagggtaggcgtgggggtcaggacaggatgcaggaggaactggtgcttaggtgagcgaaggatgggtgggagttcacaaggcagacaaaaggcagagcagcactccaggcagaggaacagctcaggagaaggcccagacggcaggcttcctgggaacctggaatgcagagtgctgggaaagcacagatgaagcatgagtctagaagggaaagcgagaggttataaagcacctggaacaccagcccacagggtttgactttagagatgatggggagccgttgaaggtccaggagtcaggcagtgaagtgattagatctgtttgagagtgatatctgacaactgccccattttaaatgaggtaaccaaggcccagagaggttgggtgagttgtccaaagccacacagctaactagcttcagtccctagagcagagttgatagaactctaatgggttttatactcattgtcacccctccccaccatgcctttccctaccctctactctcttcctctcccttctgcccaggatgaccccttctcagctctggatatccatctgagtgaccacttaatgcaggccggcatccttgagctgctccgggacgacaagaggacagtggtcttagtgacccacaagctacagtacctgccccatgcagactgggtgagggggaacaagggggtcaggctatagggggcagggctggggaggctgtcaggcatcttggcaggaaccaatccgttgtcttggtagcaactgctgagggccacaaagcataagagaccagcactggatggctttatgcatgctgggcatttcagggagaccctgtacaggccaggggtttggtatcacctagacccacagacactccccatcctggcccgggccccccatggtacactcaaggctggcaccaagaagtctcaggaataatcaagtgctcacttctcaccttctgattcctgcccttttgatgacccatccccgcagtcatggggagtgcccatttggatggaaaagccctcttcccaccctatgaccttcccggggtggatggatgcaccaccccgggaatcatatgggaaatatggaaccaaacaatagcagtagtaatagaaacttcaggctgggcgcaggggctcacacctgtaatcccagcactttgggaggccaggacaagaggatcacttgagcccagaagtttaaggctgctgtgaaccatgatcatgccactgcactccactacagcctgggcgacagagccttgtctctgaaaatttgaaaaaggaaagaaagaaagaaagaaacttcaatattatcagtagagtccaatgttgtgaaacccctcattaactaaatttccatactcttcagtaggtagaaaataattactttttgattcattagaaagcacttaatttttaagatggagatcatgtaattttgaactctaggtcttgcctactcctatataaattctcctctaaacaacagccaaaattgaggccctctttgagcttcaggctggtgccaaatggctctgcttattttccccaaaataaatcttccttccatgtatgatgagaccccctccagtataaagaagacccaaagaaaatcacccaaagaaaaaaggcccaaagataagacccaaagacctaaagatttaaatatatatacagatacagaaggtttgtttctgagtttctgtagtgaccttggcaataccttgtagttcaggacaatcctgaggaacacagaagtgctggcttccttgaggaatcagtgatcaggactctcgagccccttgaaccccagcatagggcgggagggggtgagggcagcaggggtgggtgtctgaattaatgtcaggtctacgtgatggtgtcatcaagtgttccagataaaaagttttattgagccgggcgcggtggctaatgcctgtaatcccagcaccttgggaggccaaggcgggtggattgcttgagcccaggagttcgagaccagcttggggcaacatggtgaaaccctatctctataaaaaaaaaaaaaaaaattagccaggtatggtggcgtgcacctgtggtcccagctactcaggaggctgaggcaggaggatggcttgagccaggaagcagagattgcagtgagctgagatggtgccattgcaccccagcctaggcaacagagtgagaccctgtctcaaaaaaaaaaaaaaaaaaagatttattgattccaaagaggcatggccacacacacttagaccagcaggtgctttgctaagccctgatggaggctgccagacccgccgtcaagaggagctaagggtagtgtacaatgagcccacttagtgtatgacggccgctgccgtgggtggagtccttgtgagtaaccagccagcttgagcaggatgcactaatttgctctgcaaacccagccattgagaaatacgcctcagatgtaccgaactctaggtcctaggagtatgttggttggggtaggttatcaataccagcccacttgcagtggatgagctggtggccatttgtagtgaggaaagggatgtgtcaacctccatcttagactccacaattgagggatgtgaccaccattcctccccagccagcccccaaaccacgtttgttgctgcctttccagatcattgccatgaaggatggcaccatccagagggagggtaccctcaaggacttccagaggtctgaatgccagctctttgagcactggaagaccctcatgaaccgacaggaccaagagctggagaaggtgggtatatccagggatggccaagcagccacccctggatgcaaaggttctgctagaacctgaactcataaaggtcttcctgtccttagtgccccaggaagccccctaaagggcagatgtgggagctgggcatgaactggctcctaccagaggagagacagtacctgtgccaggtgcccagggcagaatcaggtgggcaccttcgccttatcctgaggtagtcagatactatttagttgcaaagtttcagaaaatcaactcaaactggcaaagaaaactaagcaaagaaaacaagagggaattaaggatttattgacccatgaaaccaaaaagtccaggtgtgtcatagctttaagtgtgctggatccaggtagtcagtgtaatcagaaatctgtttctcccatctcttgactctgctcccctcaaattggctcagctcccctcaaattggctccattctcatggtatcagtgagggccaccagcagtcttaggtttacattctcccagctcaacaactctgccagaaaaaaagtgcctctttccccatagttcagcaaaagtcccagggctgagtctcactggtccagtttggtcatgtgcccacccctgaacaaatcactgtggccagcggtgtggaatgtgaggattggcctgtcctgggtcacgtgccactttgggagccagatccacctgaatcacagagactaaaaacaggggaagagtggttccccacagggatatgggggtgctattatctgatgaaggggaaggactaaatcctggcaagatgaatgtgtgtctgtctgcccctccctcaggcagggacaaagtagaaatctgacattggtcatcaccagagtagttaccccttaacttccccttcccccaccaaccatatatcctgaagacattgcccaggccacatctgtcttttaggagactgtcacagagagaaaagccacagagccaccccagggcctatctcgtgccatgtcctcgagggatggccttctgcaggatgaggaagaggaggaaggtacaggcaatgggactgggagtgaaattatggcctgaggtctgatcagccacagagaggctaaggtttggggttctgggtgtggtgcagtagtgtgcctttgattaaatggcttccctctgtgtgcccccgttgtcccctcagtaagtggggataaaatgccctgattcaccctcagagggatggaaatgtgtagccacagagtgggttcttgcggcctgcagaggaggcagctgagagcgaggaggatgacaacctgtcgtccatgctgcaccagcgtgctgagatcccatggcgagcctgcgccaagtacctgtcctccgccggcatcctgctcctgtcgttgctggtcttctcacagctgctcaagcacatggtcctggtggccatcgactactggctggccaagtggaccgacagcgccctgaccctgacccctgcagccaggaactgctccctcagccaggtgtgactggcggcccatggcagaggttgggagtggggatgggggaagggctgagcccatgggcaccctggaactccaaatcactctctgcctgtgaaggagtgcaccctcgaccagactgtctatgccatggtgttcacggtgctctgcagcctgggcattgtgctgtgcctcgtcacgtctgtcactgtggagtggacagggctgaaggtggccaagagactgcaccgcagcctgctaaaccggatcatcctagcccccatgaggtacccgtctcccctggccaggctgggactgtgagcaagtcactgttctctgagccttagtcttcccatctataaaatggggatatacaacctgtcacaagcttgtgggggtgactcaaggagacagtgtgtgtaaaagtgccctccttgtgcaagaagcagggagaaactggcatttactcagccagatactgtgataggcattgtgtgtggttagctcatttaattgttaccatggccctttaaagtgagcgtctgcacatccaagtaaagattgttttctcctccctaagtgggtgtaatttgcccatccccacccatgagttcagctccctgccctcccctcactctctctccctcagccagcctcaggttttgacactgggggaacaggtagctgttctattaataatttcctgtaatgggatggataaaaatctcaaaggccacttgatgtcaaagaggtttaaagttgtccctgcccaattggttggccaacttggcttaaaaacacaacaggcaaacagattttctggccccttgtcgaggctagacctcacaatctaactgcactttttactttccagcctcatgagttttctgtggcccacagatatggcctccaagtttatttacttttactctctatttgccccagctctgtagttctgaaactccctggttggggttgggctgactctgggtcagccagccggcaggctgtccccagggccctgttcctcttggcaggttgtccctctggagaggactctgtgtcccaggaggacagctgctgagtcaggccgagccggcagctgagaaaggcggcagtcgtcagatgggcttgagaaactgaaaggctaacgaaaggccagcgcccctttgggcagctgcaggaattcacggggatacaggccagatgtctacaaattggcagaggatgccagacccatgaatgactccagagacacttacatgaaataattaactatctcattcagtaaacaggaagtaaatcaatggacaaatgagtaactcttcctctggctgcctcttaggttttttgagaccacgccccttgggagcatcctgaacagattttcatctgactgtaacaccatcgaccaggtacagaggaccgtgccacactatccccccttccagagacacctcggacccctgggggcttctcctgtctgaggctgggttccccagatcaggtgatcacagccctctgggaagaagccagtgtccccgatccgattataatgctgcttcagggctggggcctccctcgtgggagcctcacagtaaggctgagggaaaccagatccctttagcttccacctgagatcccactggctttctctagtaaagttccagcatattctgaaccaaggtggctgattgtatggagaatattcattttgattcagcctgtgttctttatttaccattgtaccagatggtgtgaaaacaaaatcttgattcctacctcagggagtttaccttgtagctggagagatgagatacgtgcctataataaagggagagcaaggccgggctcagtggctcactcctgtaaccccagcactttgggaggcggaggcaggcggatcacttgaggccaggtgttcaagaccagcctgatggccaacatgatgaaaccccttctctattaaaaatacaaaaattagccaggtgtggtggcaggtgcctgtaatcccaactacttgggaagctgaggcaggagaatcatttgaacccaaggggcagaggctgccgtgaaccgagattacgctgctgcactcaagtctgggcaacagtgagactcagtctcaaaaaaataaaggatcaaaaaataaagtgagagcaaaacatggcggccagtagcactctaaacacagtcaataccaaaattcacctcactctctccccctcgtctccctcagcacatcccatccacgctggagtgcctgagccgctccaccctgctctgtgtctcagccctggccgtcatctcctatgtcacacctgtgttcctcgtggccctcttgcccctggccatcgtgtgctacttcatccagaagtacttccgggtggcgtccaggtgatggcctcaggggtgaggggtgggaggtgctttgcaatgtgcagtttggtgtacttgctagactcatcgttatgagagtaatagggtcgtgttccctccaaaaaataaaaacaaaaaacagaaatgaaggaaatagaaatatccacatcttattccaccgccctaatataatagtctgccaacacacgcacacactgaggttgacatctgaattatttccttgggcgatatggtcaggactggaattgctaggtcatgataaatgcacattttatgcccttcattcattttgccaacatgcttcccaggagggttgcatcattctagtggtcaggctgattgctgatgcatgaaatcggcgggcacctgattcaagcagtgttatgataacacctcccagcccacgtgagtccagagtgtagctgtaagccttgacttgagggagcctctcacagccattctcatggatcacatttgccctcatgagctttggatccatgcacgcctctttcctcctcaaaattttctaagaatgttctctagggagttctttctgggagtgattctcccagattcatagaaactcatagattcaaaaaattgtaggaaaaaatttaaagaacgtctaggccagtgtttctcaaactgccaattacagcccatcagtgggtcatgaaatcaatatcatggatcacaaccagcatttttttaaaaatgaaaaaaacatcagactgtattcatagagtaaagcaagctttgcttcatgaaacctttgtgttggtcatggaggtgtgtgagtactgatttgtgagataaaatatatttctgactgcaggttgtggtcagaaaggttaagtacctttcccaagtgcacatagttggctagaaactagagttgagatacttattagcaataataaaatttagatgcattttggacacaattacctgccccaaaggatcaacatttgtataaatggctttttgcttggatgatccagaatggcccgacacccacacgaacaacatagctttttgacactcaaaaaattcaaagtgctgcacaagctgttctacaaagttcatttcttctgccagagaaacagcccagtctctgtggcacccagtctgaccctggagatggtttatcagggaaatcaacttcctgcatcccaaactggcctccctggcactgatgtgcttgtcgaggtgcagctttggggagcaggaggcaattctgttgccatggaaacctctggccttaccccgagacgaaacctatcatttcagcacatcactggccagggtctaaagagctccttgatggggtaagcggaagacggggttgaacgctttgagtttggtcttctgttcctttggccagctgtctcaaggttcagattgttcacctgtaaaatggaactagcactgcctgcccagccttagctcagctccaggctgtgcagcagaagtacagggacagatggcgacctggggttgacaatgcccaggacagcagtaattgtgccccacatcaggctgtgtctaagcattgtacataaacgatctcattcagtgctcacaaaagctcaatgggctggtggcattgtcttcccccttcacggggtaagaagctgaggcctagagaggtaaggccattcacccacacagcggtagcaggtggagctaggcttcaggcccaggccgagccctgagcctgccctcttaactgttccactctgttccccgccacagggacctgcagcagctggatgacaccacccagcttccacttctctcacactttgccgaaaccgtagaaggactcaccaccatccgggccttcaggtacgagtccacattcccccaaggtaggagtggaacaggggtggggccagggggcacaggccatgagatttgattctcaggactccacttgggaaggccaaggacacgttctctctcaagctgcctcaggtcccaaggcccaagggatatccaccagcagggacaggccaggtgggctcccactgaatgttctagagaggaaaattccagctctgtagacaagcccaggacctctgtgaggcagagcatgaaaagagacaaagctgggacaagtcttcatgtatcaacgctagaaagggccttaggtgcgggccaccctaagcccttcttttattaaggagcccctgtgtgccaaacactatgctgagtactgtacaggccaatcccactcattctgcactgcaaccctcggtgctgagaatggtcatttccattgcacagacaaggaaactgaggcacagagacgttctataacctctctgtgtaaggtgccacaaagcccagacttgaacctatttgttcatgcaacaaacatttactaagccccgactatgtgctaagccccatgccaggcactaaaaagatgagtcaaataagccgctgccctgcaggcgtttacagcccagactttgagcaggccaggataaatccacgtgacaagtattctgaaaaaagcggattcaagggctgtgggagcatagaagagagacagtccgggaaggtttttgtaccagaggtgtcatcagaactaggactcaaaggaggggcaggagttcaccaggctgaggaattcctgaaaacttcagtgcccctgccatcgtctcactaccctgagtggtgatgttggggtggacaggagcatctgaggttgcctggggaatgagggaagctgttgtttcccactccccaagagtctgtctgatctccagaggcatctctcttccagtcaggcaggccagagacccctgacacacaaagttgggctcttttctcatcttcatccagagagtgataataggttatttttagggtggcacagctgcacgaagtatgacagtaaccatgagacaccaagcactgtgtccaggagtaaccatagggcacaaggaccagccaagggccagagaggcttacatctcctccccccaacccctgaagtccagcttcagccctggagaggtatccaggcccctctgcccaccctggagcacctagggccagtggaaatccacctcttagggatcttgtctaagtaaagaagagcagagcaaagctctgccctggccttggcgctgctccctggacatcccttgcccctggacaagcctatgctgtgtcttccacaaagaagcttgctggggactggattatgactctagagtctcctcccagcctcctcttctcaagcctgaacttctcccgttccttcaacttccaggtccctcgacattactgagcctagcctttgctctaagttttggtgatttccctctctcaattggtgtctcagagggccctggggtagagagatggtgactcttctagagtgggccacagccccttgtgtgcagatcccagcttcctgtaaacagcctcagatcaggccaaacctgtggtcagccagagccactgctacccagtgaggtcttccacaccctactgacacggtgaatgatttttaaatttgaatgaaaggctttttaatcaaccccatacacatttaatgcattggctttaatccagcagcctgttgagagctattagcacttattgattgcccacttactgtatgccaggcaccgtgctaagtgttgtatgtgcattattacatttaatcctcacaaggaccacataacataggtacgaatcgccacattctccagatgcagaagcgagacccagagaggctgggtaatcaatccaaggtcacacagactgcgggggctggcgctgagcttggaacccaggtttgcctgaccttctgggctttcctaagagatcttattttttcccaaaagagtttcaagagtgcccagcactgggctcagtggcgggctcggaggttgttttcgttcatgtaggaactatcacttccccatttttttcataagaaaactgagtctcagtcctgatacacagccaggaagttgtgatgttcaggctccaacctgggtttacatggctccgaggctggggctcttttctagtcctcagacacactgtcgcacgcctgtggcagaagctcccatctcacacttgccgaccctcaactcacacagtcctgagacccacatacgctgagcgcctcacactcctataacacgcacatgccctgatgcacacacattttcaacacgcacttactctacccttcaggcatggtttcacactcactgcagacacgtcaccctcccacacgtctccaccctgggggtgtgcagtagcatgctctctcccacctcagaacctcccttcagtcccctcagacacatgccctctctccacgcagagacaatcaaagctgaactaacaccttccagggtgaaaagcaaatgcccagtaaggtacgtcttgggtgcctccgtgtcccctgagtttggtcctatcaaaccagcgatgatgaggcagcttttctttcgttccttcctccatcatcaaacaagtgctcctgcatctcctctgggccgggcctacgtcagcaaggtctgagggaagcggccaaggagagtgatgacggcagcccaggttgatcagagaaaggaggcaggtccatgcgcagtaactcagggaaaacatgatgaggacctaaggatgagaaagaagcctccagagttccctgtgcagagagattccatcaatttcagagggtcaggggagtgccatgcattcatccaacaaatatttattgatagtgccaggtgctggggtatattggtgaataaaacatcttcatggaatttgcagtctattgagggagatgattataaatagctagagaaatgcatgtacagcagatactgtggagcaaacaggttgcagacaataataggggaaacctactttatagtaaggtagtagccaggaagagcctctctgaggaggcagcatttaaggcaagccctgaaggttgagttgagccagccttatgaagagcaagggcaaaagccttccaggaaaagggaatagtgtgtgcaaaggccctggggtagggaagactttagtattgtcacagagcttttaaaaagctgagtggctgcagcatagtgtgtggggtgtttgtggcaggaattaggttggcaggagggggttcttcatcctataagcagtggaaggtcattaatattcttttttatttgtttttttttttttttttttttttttttttgaggcagagtctcactttgtcacccaggctggagtgcagtgaggtgatcttggctcactgcaacctccacctcccgggttcaagcaattatcctggcttcctcagcctcccaagtagctgggattacaggtgtgcaccaccatgcccagctactaatttttgtattattagtagagacagaattccaccatgttggccaggctggtcttgaactcttgacctcaggtgatccgcccgcctcagcctcccaaagtgctgggattacaggggtgagtcaccgcatccggccggagatcattaatattctaaacagtgggggagaggacacagtttgcgatttagatagattaagccagccactgtgtggagcatggactgtagggagacagcaggtagacgtattcaggaagctgatgcagtagtccaggtgagagtttgtggtgggcaggaagcaggatagagggggagggaggcaaggactcttttagagagagacataagaggacttgccaaggggctgaatgtgaatccaggtgattcctgggtgagaaactgggtaaagggaggtgccccttattataatgggaaagacctagagaaaatggatcttggggtgaaaacaagagtttggaggaggtggggattctggacaggtttgaataagcagaaaggagtggggtggacattccagagagggatagcttacatgaagtggccacggtggcatgtctggggactggaggggccctggagcctccctctgcaggtagggagactcctaggagctatgtggaccaacactgttcccttaggagcttctcatcctccctccaggtatgaggcccggttccagcagaagcttctcgaatacacagactccaacaacattgcttccctcttcctcacagctgccaacagatggctggaagtccgaatggcaagtgctattcccctctaccctggcctctgataggagggtggggccagagcaagagcacacaggtacctggggatgaaagagaggataggataccagatcgtgtggacaccaagccttcctgcttcccccagccctggtggtcctcctagtgtctagcctgtgctccttttccccatatcactgcctggaggcttgtgtatctgaggtgtgtgccagtggcaagaacagttgtggtgaatgtgtatctgcagtgggtcatatgacacccacattgtgtgtgtttgtgggccagctgaggcgtgcatgttaaagggtgtgcaggggctagggggtaggggagcatgagcttgtgggacatgttggctcctggggctccagccttcgcagcccttgtgtgtgtctggtgacgtgtgcatgagttgcagggctggagtggaggcctggctgagctgctctctgccccgaaaaggagtgaggtagaacaggggcctgtggctctaacccctgagcgcccaggtcagctcctctccctccccaggagtacatcggtgcatgtgtggtgctcatcgcagcggtgacctccatctccaactccctgcacagggagctctctgctggcctggtgggcctgggccttacctacgccctaatggtgagcggcagtgggctagggcagaggaggggtcagacaccagcactcccggagcaccttcgtcactggagacatgagacactcccaggccttaccccaatttcatttgcatctgatgccagagggacagtgcgggcaggaaggctgaccagcaggccccagggcccaggccccagacaggtggaggttggggagccacatgactgaccctccctgtgcctccagggagggctgctctgagcaggcagtggatggcagcaaaaggaatctggggccctggcccctctccagccttaagaagagccattctggtggctgaggacagaactaagcgaccatggagtgtgcgccactggcttgctccccacaggtctccaactacctcaactggatggtgaggaacctggcagacatggagctccagctgggggctgtgaagcgcatccatgggctcctgaaaaccgaggcagagagctacgaggggctcctgggtgagaggctcagggagaggggtggggaagagtccaaggaggagtgtgtctgggttgggggccacaagggagcctggggatggggtggcactttcggatactagctgtggcccatgcctggtggctgagcccagcccggcccccagcaccatcgctgatcccaaagaactggccagaccaagggaagatccagatccagaacctgagcgtgcgctacgacagctccctgaagccggtgctgaagcacgtcaatgccctcatcgcccctggacagaaggtcagagcacgggcccaacccaatgctgcaggacaggcgtgagcaggggatggggcatgcacggagctggatggcttcgcagtcacctcgtggccctccagggccgaggcctctcactattcagacatcgcagtctcctgccctgggcctgtgggggcccatctttcctctccttctattgccttcccccagtgctgccctcaggccttgtcttctcactcatccaccaaggagaccgacactctggactcccccagctcacacgggctttgtcagggcctccctctctgcgaatggtcaggggctttccctagggcactgccccgagcttcagggcagggacctgggggcagacagcgaggccacccttgtattgagggtgagcccctgcctatggccctggcccagctctcctctcgtttcccactctgtctctttgtctctgtctcactttgctgtggctgtccatgtcattctctgaccttgggatgtacctctgtccctgcctctctcatccttctatgtcactatctgtctccgtattgtaatttctgttggtacccaagtgccaggaagcaacgggatcagaggtggctccattgtagggcggggcacacagacacatccatgcataccactctcagctgcccctgtgtcctcctgccacacccatgcccatagagacacaccactgccccccagctctccttcagccaagtacccggcacacccagacccacaccaaggcccaggcaaatggacatccatgcctgcacttgcgtgccggtccctgtgtaagccctctctggacccactgcaggaaacaagcccaaacctgtggtgtccaaagagaaactagtcagaaaaccaggccaaaaagataccctgtgacctcccacacctgcacacacacccagagctagcatagaggctattcccagcagccccagagtcccagtggcggtgcctgcttctctctttccagatcgggatctgcggccgcaccggcagtgggaagtcctccttctctcttgccttcttccgcatggtggacacgttcgaaggtgagttgtaaggcgggcaccccacgtgtacccacagccaccagatgaggcctcagccctggcacgtggtcagacatgacaggaggcccagcagtcaccgccttcccctgcaccctcactgggacccatgcagggcacatcatcattgatggcattgacatcgccaaactgccgctgcacaccctgcgctcacgcctctccatcatcctgcaggaccccgtcctcttcagcggcaccatccggtgagccccaccacccctcaggcccacccagccccaggccggctcagttccatcagatctggagcacaaagaggagggggttgggggagaccaggatcccagaggtgtttcctgctcatgcccttctccatcccatcaggcccaggcagcctctggaaggggatcccccacccatgggtctaagatgctgtcccccacccactgccaccacctcggtgcttctcccagccagacctccaactcagtctgctctcgctcactgccctctttgccgcctggggatgcaggcaggaccctgctccctccctactggggctttctgtgccacttccagatttaacctggaccctgagaggaagtgctcagatagcacactgtgggaggccctggaaatcgcccagctgaagctggtggtgaaggcactgccaggaggcctcggtaactactcctggctatgcagctgggttggttgggcactcaaggaccctgtaaggatggcagacagaagcccgtgtctcaggtttgccccaagtttggagtctgaagcctggcaggaccatttagtcctacttctcactatacgggggcccagagaggtcaggtgtcttgccccaggtcacacaactggtcagttcagggtctggctcctcctgcagggtacagcgggtacagtcagggatccttgtgagacagagattgcgagtcccccatgccaagggggcatcttcagccctgccctgccccatccacctgcatgcccagttctgccttaggggaggagaagatggactgggcaatcatagacacgggtcactcatcaaggccaccggtgattggcaaagccttggtatatttgctgcagctcctggagcattgggggtggccaagccttggtttcaatgaatcaccctaccaaggccctacatacacactcagtgcacccctcagtgcacacgccccctcccagaactgcccagggccacagcagcacacacctccaggggtgcccttctcgttgcagtccttgcagacggcctccacattgttgtgtcaggtgcaccagccctgcacacgcctgtgctcttggacacacacccacctatttgcccccatgcacacattttccaacagccccccaagccatcccatctgctccactcacagcacaagattaactcagtcctacttcatctccccgggctgttttcagatgccatcatcacagaaggcggggagaatttcagccagggacagaggcagctgttctgcctggcccgggccttcgtgaggaagaccagcatcttcatcatggacgaggccacggcttccattgacatggccacggttggtcctgggcccctccatgggaccatggtcttggaaagggtttagtgggatgctagggagaaatttgcacgaagtagtcctgaggctcaagttgcctctaacatcaaatgctatgtgttgcagaaaatgaaaagagctggggggaccctgactctgtctagtcttagggaatgttacacacacacacgcacacacaaaaacactatgcaaacacacacataagctgcacacacagacccacacagacttcacactgtcacctatcacaacagcacacacacagccacaaccacaacctacatacacacacagagctgagctcccaacaggctgagtccagtccctgagtgccgggaacctgttcagtcctgtggggtgggggtgggactaggatcggggtcagatgggagctgagccacagacctgggctccacatcccccaagccaggccagaccccatccactgggcaggtgagccaacagctgttgcccccacttggcaggaaaacatcctccaaaaggtggtgatgacagccttcgcagaccgcactgtggtcaccatcgcggtaaggggcccattgatggggtgcagagggacacccagggacaggactggcctgttgtggccgtcatcagtgcacagcccctgggcttgcctggtcccagtaatcaagaaagaaccctgaagcaggcagttcagggcaaggggcctggagggcatgcagggagcctgggttgcaggatttggggtggggggttttgcccctgtgcttccctcagacctcccctctccttctccaggttccaaggcctgcccctgtcccaaggccttatatgttaggctggcgttacttctccataggaagtgggggaggggttgtggagggtctctgagccttgaagcctggaggtggggtagagttgggacttggagaggagagaagggtggtattagcagatggagagcttgtagtcacatccaccccaggaaagtgcagtccccacagtgacaggacattctggccacatgcctcatcctcctcctccaagccgcaggagggccaccctcagctgtggcccccaccgcgggtggtattcccaccatcctgacccgccccctcctgccctgcccagcatcgagtgcacaccatcctgagtgcagacctggtgatcgtcctgaagcggggtgccatccttgagttcgataagccagagaagctgctcagccggaaggacagcgtcttcgcctccttcgtccgtgcagacaagtgacctgccagagcccaagtgccatcccacattcggaccctgcccatacccctgcctgggttttctaactgtaaatcacttgtaaataaatagatttgat

SEQ ID NO: 15335 - DNA, 82388 bp, Homo sapiens
ccgcacgtcttcctactcttcatcaccttccccatcctcttcattggtgagtgcgcgcagcgagccgcggaggaggggacgggagagcagggagggaggaggaggcgctgcgcgccgcaccgctcggcgtccccttccggcccgcgaccgccgtccgcctcgttcccggggtcccctgccctgtgtcctgcccgccggtccccgcactcgcacaccagctcatcccttcactcccccggtgcccccgatcccgcgccaaacacagcggacgtttgtgacccatgggatcaccaagttttgcttctgcagggccaagagctgggatggggaaaagggaaagaggaggtctcagcacgcagtgggaaactggagaggggtcgggcctcaccctccgtggcgcagcttagggagccgggtcacccctcccgcaaggcagcctccctgtcagccgcagctgggcctagggaagagggaagcctgtgctttggagtctgggatggaggcccagctaacccctatgctttcaccgggctgagccgcgcagtggtccgtgatctctgacagtcccaggcccgcgccctgggcgaggagaggcgagagctagggacttggattcccttcccccgccaccccacccgggcatgtgtctccagagcgcaacttctcaggctctgcgcaaagtagctccgactcgccgacgcagcgaccccggcgcccttgcttgcaaagttgggcgccacggccgggacaatcgtgcgtgcctctccactgaggtcccccccatctctctccaagaccttgactcttccagaccagtcaagtctatcaactcatagggtgtcccctgcatccccaaaacgtgttcattcactttaagaaaacaagcaaatcttaaaattcatatacagctttggggaagaaaggaaagattgtcacaaaattagatttacaagaggttgctgcagaagcagagttgctagttattaacaaagacagttagatagaaatagaaataaaacatacaaaatatgtgctcatatgtgcatcaaaaatcaaaaaagaacagcatttacacttctgttctcagccaaacggtttattaacctgatgacttgtcacacaagaagttagtatgtataatggggtaccttggcagggcacagtggcttacatctgtaatctcagcattttggtgggctgtgacaggaagactgcttgagtccaggagttcgagaccagcctgggcaacatagtgagaccccccccgccctttctacaaaaaattaaaaattagctgagcatggtgatgtgcgcctgtagtcccagctactcaggaggctgaggcgggaggatcacttgagcctaggagatcaaggctgtagtgagccgtgatcgtggcactgcactccagcagaggcaacagagcaagaccctgtctcagtaaaaaggtgtggtgggggaggtaccagcataggaccaggctgaatgagttggacgtttagtttgtgtgtaccagccttggggatcctcatgtgtaggtgtcaccctcaccatggacccaatgcccaagcacctttctggggttcatgcaccctcttcctcctccaagtgggcaggcatcctgcctctgactgtctctccctgcaggatggggaagtcagagctccaaggtgcacatccaccacagcacatggcttcatttccctgggcacaacctgcggtggatcctgaccttcatgctgctcttcgtcctggtgtgtgagattgcagagggcatcctgtctgatgggtgagtgactgtctgaggactcaggaaagtgaatctgctccagggtacttcctgaaaggcccaaggagatcctagctcacctatattccacaagcccatgtcttttgttactacatccagcagctcagtgtcttctatgtgccaacctctctgagctgggcactggacgcaagtgagtcccaggccctgccatcagtccaggagagcagagggaacacggacctgcatgccaagtcccagtgaaataatgctagagcctattagaatgccacaactccagtgaaaaatgtctggcctcttctacaacctgccggagttaccttcttggaaaaaaaaaaaaatctaaccatgccacccactcttgcataagacctttccttggttctcagctgttttgaagatgtggtctcagatcctcagcccaccattcaaggtcttcacagtcagccccacctatctctggcctcattccccatgcccaccttccgtttgggcctcacagcacactcctcacacctctgctacagcacagatcacactgtatgttaaagtttatgtctatttgcaaaactgtcttcagagtcagaaaggcctaagagttagaatctgagtcttgttcatctttgtgttcacagtgcaaggcatgtgataaacataaacattattcagtccataaacatttattgggtccttaggagaatgaatgaaaccatgttacaaataagtactctgggaggtgagaggaaggcagaattgggcaagctccatggttgagagggctttggagcggagtctggaagggtgactaggcttcagacacacagaggaggaaggagagagagaactggtggtgcctgagggaagggaaaaggcaccaaagagaaaagcaggtagggctagggagcagcgcaggggctggagcattaaacacaggctggggagcgatggaggctgaggctgggaacccaggttggggcatctcaggaggactgtgaatcccagcctgcatgtttgggtcggatttggtcagcagtttggaacagaagagagatgtcatcagcataacacttttaggtgggaacctgaggtgttcagcgcaggctggaggcagggagaatctagaggtataatagaagcaggacttagcattgactgcagtagtctaggtgagcaataactgcagacagaaatggtgtgtcagcagtcagggacagaagaggagcgggagcagccatctcactaaggaagaatccagtaaccagcaaggatgagagactgccaggagagggagtggtggaggagagggatatttggcttgagtatctgaggtccagcgccccctgagctggaatcagattatacccagactgcactcctgcagtgctgcctggctcctgtagttggatggcaggggataggctccctcatcctccctcccgttccccaccttcccttccccaatgtccctgcatcctggcttcagcagtgatctctaaaatacctgcttgacttggaggcagcagctctgcctgcttattaaagtccctagaccagcaagaagaccagaaggcatactgctacacaagcacgtgacaagtccgcctccacccccacccctacaccccttccaaagtagcacaaatgccacagtgagccctcagatgggaaatactcaccagatggtgacagagaaagacacctccgcccttggagaaggaagacctgggtcttcagtgagcactgctgctgtgtaccagctatgggactttgcacaagtcattcaggctttctgggcctcataagcatttataaacatacgataaaacattttagttgccaacttaaaaatgtgtgagaaagtataaggtgtttcaaaattatttcaaggagtaaagaggcaagagttttgaagatccctgggcagggtgttggctgttcccagtgtggccattcatgactgctctctggccttatgaaacaagcatcatagtccctggcttgcctgcttcatggggctgtggagggtgaaattcgagcatggacagggtgcagagcccggagtggcagagcactgggtagactgtgtattcccagaatgtgggaaactggaatgaatcggtccagggatgccctcctgctggctgtcagcagcccctcctgtgtgtggctgtactgcttcagctcagtgcaaagggccatctcctccccagggcacagatcagctcaagctgagtaattgtcatctggtctttgtgagctcctacccccaggcctgagtgaggggcaggaaaagagcagacaggagaagtcacagacccttgtgatacctccagtctaatccagcctgggttttcagagctgtctggaaatttagggggcaggtgggagggggctgattaaggcagccctgatttgatttagagtgagcctcatttagtgactaattaagccatcttaaacctgtagggcttcccctcttcctttgggtattatttctttctgtgatgttctgaattcagaacaatcaaaacagtataagttagtgaagaagatattttttaataactacaatattttcccagaccaccatacactggataaagcctgtatataaaactttacctaatttcttaactaattgaatgtgtattatttaacaaagcagctaaaaactattctatgaagccatgtcatgaaatatttagttcaattatggttaatcctcatcttatttcgtcttataaaattttaacatttctacctcctattgcaaaaaaaagcatttatatcagcatataataaaacatgtctagatgtcagcttaaaaatgtgtgagagagtagagggtgtttcaaaattatttcaaggagtaaagaggcaagagttttgaagatccccaggaagggtgttggctgtgcccagtgttgccattcatgactgctctctggccttgtctgtcttgtaccttctatattagtttgaagaccttttttggagaatattcactaaagaatatcaatatctaccatttcattaaaaaagaaatgtggagtttgccttttcaagttggtttgatgcttattgatgttttcagggacccagcctcttcccatctttccataccatcctgtgtgtgtgtgtcagcctatcttccccatggtcacaaggtggctgcctagctccgggtattgcttagcatgagcagagagggcatgctgccgacatgcctctcctttatgacagagatcattctttctttgacatctcactggccagaatacgtggaccaacactggcaaaggagtatggaattgcatggctgcttaaaccaatcaccatccattccctggggctgggtatattgctgctggagcaaacctgtggtcctcctggcacagaataaggggaagatactctttggtggacagcccacattgcctctacacttgcacctcagtcccaccagacccactgaggtcacaggatagctctcctcatgtccttcctccttctctgttgaactcttatgtatccttcaaagtccagcctggtgccacctcctctgggaagctgtccttggttgcccaccccctcctttgtgctctctcagtctctgtccatcggcagtatcacttccctagcctgctgactccaacagttagctctgagcatggcagccccctccataccatcagcttctcaagggcagggacccttggcacactggatagaagtagcctggtgggcaacagcagcactgaggcagcaagctgtagcaggccatctgggaatggagtgggtaccacagggctggagcagaaagggcaggctgggcagatctgataaagtggctggaggccacatagcctgggcctttcgttccaggctgagcagagtgggttttgctgtctgcaggagggagctgtggaagggcatgatcacgaccaactaaggtgaccctcctcaccaggcccagggaagactgaggcctggaaggaggctctggctgcctctgggtcttacccccaggccacagtccacccacttagaggcctctgtgagttaaggtggagagactatgagctggtattgactgctccattccccatcccgagagaggagacaaaatcagtgaccttggaaatgcctcttcgtgcctcagtttcctcaccccataaaatgggagactaagagtacccactcgatggggtttaatgaagattaaatgggttaacatatatcgcatgcttagaacagtgcctggcacagagtaaatgctccataaatactgactctcatcagtttgttatcacagcctctggggagggcgccagtgctgacttatgctgttcgtgttaaatggggctgtcactgggtgagttgtggcatacaggcccctgcactgttcaagagaccccagcaacccttgtgcttagggctcagcacatagtaaggcctccagatcatatacccagctctactccatgtactggcagctctgcccagcccataccccaaatacgcccattaactaaagggccctgcagcctataaagtgatgctataaaggttcagtgttcagcctttgaaattcaaggcctgggctgctctattgcagtacttagcatgtccccatcctgtctgtttctctctcccatctcagggtgaccgaatcccaccatctgcacctgtacatgccagccgggatggcgttcatggctgctgtcacctccgtggtctactatcacaacatcgagacttccaacttccccaagctgctaattggtaggtgaggtgtaggagggaggggcagtaccttcattcatttcttcagataatgtttactgaggactcattatgtgccagctattgctctaaacagtagagatttggaatagaaaaagaaaaaaatccctgccttcatggagcttacagtctggtgaaggaggatagacaggcaaagacagtgaataaacaagcaaacaaataggtggtggggatgctatgaagaaaatcaagctgagtaaggggtaggggcaatgacaatgttgctatctacacaggatggtcagggaagggctgtggtaactgtgggcatgcagatatttgggggaaggtattccctgcaaggggagtgacaagtgcaaagtcctctgatagggatagatttggcaaagatgtcactgtgggcaaagccaaatgagcaaggggaagagtgggaggtgagggcaggcgtcaggagaggagcgagcaagagtcccaggctctgggcctgagagcctgggtgaactgtggcatcaataactgatgtgacagaggagggggaggtgggctgtggtggggataaagttttctactgggggcatatcgagtttgagatgtcacagagacagccaactcaagtgtcaagttgggctttcatggggaggtcaggacaggagctacactttcaggaggtgggccttgtagatgacatctaaagcttgagcctggggctggctgccgtggctcacacctgtaaccccagcactttgggaggccgaggtgggcggatcacccgaggtcaggagtttgagaccagcctgaccaacatggagaaacccccacctctactaaaaatagaaaaattagctgggcatggtggcacgcatcggtggtcccaggtactcaggaggctgaggcagtcaaatctcttgaacccaggaggtggagattgtagtgagctgagatcgcgccactgcagtccagcctgggtgacagagcaagactccatctagaaggaaggaaggaaggaaggaaggagggagggagggaagggagggagggaggagggagggagaagaaagcttgagcctggatgaggtcacctggggagagaagagaaaggctctgggaccagagcttgaggtttgctaacatttagagagactcgggaaggactgcccacttagagcttctgagatgttaaatactgcaggactggggtcccaggcagaagcaacaggatgatggttggtgtttactgagcatgtgccatggggcaggctccatgccatgttccttacattcattgtcccacaggctaattcccccagcctccttattggtattgttaatatccccattttccagtgtggaccctgaaactgagaggttaaaaataataacagtaaatactcactttgtacttactgtatgccaggccccatcctacctatgtgatatattaattcatttaatccttgcaacaactctatgaggtaggtaccattattattttccctttacatatcagaaaactgaggctcagaggttaaataactggcactagtctagctcgtcaaggggcacagccgggagtctagcatctgtgcaatctcctaatcatttctgagactgcgtgtctaagggccctcagacttcgtccttggggtaaaggtatcaatccgcaggtctgcctctgtgttggggttcagcctgtgtgtctaaggctggggctgtacatctggcagttagactttgttcacactatgtccttaagtcagactgatttttaggtatcacagcatcgaattgacatttggagtctggcacactctgtgctaagccagtgacatcatggtgttgtcagggagtacagggtgtttcttgcactagtcacaggtctgcctttctgtagaaggtgggatctgagctccattaggattatccaggtgatccccctacccctagcccaggggcccccacatgagtatgaatgggagctgggggaagcaggttgagaggggagatgttaaatacaggcttcagagagccaccctgcttccatttctgaagtagctccttgtctgtagagaacccttcattaaccagggcctggctgaccagtgtcctctggaaacaccctgtctggacatctgaggagttcattttctcattctccagcaaacacataatgttctctctttaaagcacaagttatcacccgtggatggatttgtccttttctaaggaacaaagactaactccctccattccccttgttggagttatctccccttgaaaggacactccacagagccagaaattctagaacagggaaaagtggaggggacgtgcctgtgaactgcagggacagaaggaaatgggtattgggagaatggccagccctccaaggggctgatgtctggcctgggtatggagtcccacagaaaggggacctgtgatgcagcttacattgtcccgtgagggaaccatgatcctggaacccagatgaggccaaggaaatgttctctgaaaaagtcatatttgagctgagaactgaaggaactaactgggagaagggaggaaagagtgcttcaggcagaggaaacagcatgtgcaaaggccccaaggcagaaggaacaaaacacattagaaaattcagaagaagaagagtggcgtgggtgcaaagtggaggggagctggactttgggttttgtttgcttgtgcccaggctggagtgcagtggcaccaccttgggtcactacaacctccgcttcctgggttcaagcggattcttgtgcctcagcctgctgagtagctgggaatacaggcgtgtaccaccacactcagataattttttgtatttttagaagagttgggatttcaccctgttgaccatgctggtcttgaactcctggccttaagtgatcaggtctcaacttcccaaagtgttgggattacagccgtgagccaccgcacccacctggaaggtcataccacagatgtttgcctttatcccaacagcaatgggaagttgtgtgtgtgtgtgtgtgtgtgtgtgtgtgtgtgtgtgtgtgtggtttaacatgtttaacataaaatttatcatcttaactgtttttaagtatagtgttctgtggcattaagtatattcacagccgggcatggtggctcatgcctgtaatcccagcaccttggcaggccaaggcaggtgaattgcttgagctcagaagttcgagaccagcctggccaacatgccaaaaccccgtctctacaaaaaacataaaaattagctgggcgtggtaatgtacacctgtagttccagctacttgggaggctgaggtgggagtatcatgggaggctgaggagagaggatcagttgagcctggaaagtggaggctacagtgagccaagattgtgccactgcactccagccaagattgtgccactgcactccagcctggacaacagagtgagaccctgtctcaaaaaaagaaaaaaaaagtatattcacagtgctgtgtagccatcaccactatccatctccagaactttttcatcttcccaggttgaaactctgtactcattaaatgataactccccatttctccctccttacagcccctgacgaccaccattctactttctatctatgaatttgagcactctaggtacctcatctaagcggcatcatgcactgtctttttttttttttttttttttgagatggagtcttgctctgttgcccaggttggagtgcagtggtgcaatctcggctcaccgcaacctctgcttctctggttcaagcgattctcctgcctcagcctcctgagtaactgggactataggtacctgccaccacgcctggctaatttttgtatttttagtagagacggggtttcaccatattggctaggctggtctcaaactcctgatcttgtgatctgcccacctcggcctcccaaagtgctcggattacaggcgagagccaccttgcctggcctatttgtctttttatgacttgcttatttcactgagcataatgtcctcaaggttcatccatgttgtagcatgtattgaaatttccttcctttttaaggctaatattctactgtatggatatgccacattttgtttatctattcgtctgtcagtgggttgcttccacctcttgactcttgtaaatagcactgctatgaacatgggtgcattgaggggttttcgacataatcataataattgctttatggagaccagcttggaggagaacaagatggggaggaagtgtggaaaccaatgagaaggctctcagggtatagcgggaatacagaggacgcatgatgatgcctggacttaggtggtaccacagggatggagagaagtagatagagtcaagctatttaggacgtgaaatagacagcatttgttaatgggagaggtgtggggcgagggagaagaatagagggagaaggaggagtaatgggagctcaccagcagcccccatgttatgcctctttccttccttttccctcttctctcatcaggcattcagcttttgctgagtacttctgtgtctgacaacaggctgagcactcagcactgcaggacaggactatgcaaaaaacctctgggcctagtcctgggtgcactgctaattccctgtgtgaccttgcacaagacatccaagctctctgagcctcggattccccacctgggcaggaagagtaagtccctgcctaagtcatagggttgtaatgaagagcaaagcagaccatatctgttaagtgttagggacaagacaagcatgaggcatattttcaagtctcggctcctgtaggcagctctcactaagggctaaagggcttctgatgcctgggatagaatctgtccggcagagtggagtggaggcagggggacagccttcagctgtggaattcctccagtcctagagaccagcctgagctgggggacattattccagtcctgaggcatgagagcagaaggccgatgcttctgccctccatcctaatgtcctcctgcagggacccaaggtggatggcatcgatccccccgggtgagctcagccctgggcgcatggtggggcccaacatctcaacctgtttcctaaccctgagccaggcaggacagatcccagatttgtgcccaagagatgctctggcatccatgcccaggcccacatagggatagagggcagggtgaaagtctctctccctcactcgggtcctctggagaggggctctgtgtcatgaagctgaccttatccgcatctggtctaggagggaggagggaaggagctgccagtgctaaaatctcccccaccctcaaagggggacttcacaggttattgctggttttggttgttggaagctgacagtgatttattggcagattgaagtgagtgtgtgtgcgagaatttaggatagaatctactgatagcttctgaggtttaccttccccaggtcttaaatctggagataataaaaatataacagctaatgtccaaagagcacccgctgcgtgtgaggctcactgcactaaatgctttccatatgtttctcacaagaaccttctaggtagcactattatgattcccacttaatggatgaggaaactaagctctagaaggctaagtgactaatccaaggtcacacagctattatgtcacaggctctgagcccaggtgtatctggctgcggagccaccaccactaacccctgtataacgctgcctcacagaactgtggctggctctttccgtatcccccatgcccctgctccatcatcatgctgtggtgggctctgaactgtgaggacagggatccaggctttcaccctctctctgtccctagctgccagtgcacttgggcaaggtcacatcctatttctgggcctcagtttcctcatctgtaaaatgaaaggctggattgaatgacctttaagatttccctcacttggaaattccacaagtaagtcattatagcatggagcttgcatgcatgggctccagcgtcaggccagcccagctctgccagttaatgggtgtgtggccttggatctgttacctaacctttctgagcctcatttcctttgtctgagaaattgggggtgacggcagtgtactttctttgaaaagttatggtgaggaatagataagatcatgtgtttaaagtgcttacttggcacagtgcctgtaacttagttaaattcaataaataaatttcccattcttcccatgatcatttatttttaagggacatttgtctgaccagtttgatttatgagattattggtgtttttcatgaatgttaagacgtacgtgcgtcatcttagagtcatgtactctgatatattcacacgtgcacatccacttactcggaaatgtacacacccaggcacgcttattctgtctccttctctgccacatacttgcacacattatgtgagtgtacacacatgatgcacacacgtctctgcgatcttccatctctcctcggcagccctgctggtgtattggaccctggccttcatcaccaagaccatcaagtttgtcaagttcttggaccacgccatcggcttctcgcagctacgcttctgcctcacagggctgctggtgatcctctatgggatgctgctcctcgtggaggtcaatgtcatcagggtgagggtaagcaggccacctgggccagggtggggtgggaagcagaggctctggcctctgtcctgccctgggttcaggcccccaccctgcttctcagccaaactgagaagggatcagcttgttttacccgcccgtgtaaaggggagtggggccgtggcggaaatttcaggatagacactgcatctggcccacgtgtgctctaccccagggtcccagagggagaggggggtgatgggtgtgttcgctgaggttggcggatgactttccgtagaaagggaagataagcatcaggcactggcctctcctactttctttcttcgggggtgggggactttgctttaatgtattcatatcgtcacgctggtaaatgaatgagtaagtgttttgttttcctttctgtttgctcccgcctccctctctcttcctcaccccagactccaaccttccccttcccctgcccctacctccccaggcagcccagactaatgaactcgtttgtctttcccatgctttgtttttattagtataataccatatgtgtctgtctaaataaatacctattcaggttttttcctctcaacacaagtgaatatgtaggtttcccccacggtatttatcttgtaagaatgggatcatattatgcagttttctgcactgtgcttttctcacccaacaaatatctcttgggactccctccaagccatctgatatggctaattccgttttcttaatggctgcataatattccatcgtatggatgagccataatgtgttcagctatttctctatggatgggcatttactttgttgccaagttcttgccttcatgaataatggtgtgttgaacatacttatatatttatgtattgctgcttttatttctatgggagagagtccaaggaatggcgttgctgggtcaaagggtctgtgtattttaaattttgatcagtgttacatattgccttccagaaagactgtaatctgccagcaatgagtgagaaaaccctttccctgccttccaaccagcagtgagggctacagccctttcgaacttggactgcctgcatttctctgactcttctgcttttagttggtgatctgcagggcacaaagctccttatgtgtccccccatccagtgaccctcacaggaaccctgtgatgcaagcaccatcccctttatagatgaggaaacattttagatgaggcttgtccaaaaacaccttgctagtaagtggaggaggcaggattcaaaaccaggtctgcatgacttggagttctgtgaactgtatatgaaacatggtggtatccttagatctgtggagaagatagcatatgagagattcctgctcctccccaacccaacctaaacccaacccagcctagccatggggggttcaaagtcgacctcaatgagcagttacaaagtcaggatgccctgacattggtggccaagaagtgttggggaatccttttcctggtaataattacaggcgaaagatggccccatctgttagagatcaagtgtggaatatcacaaccccagatccttgctggggcaaggtagggagtggtgagaagttggacttacccatcccccatggcccatgtgccccacagagatacatcttcttcaagacaccgagggaggtgaagcctcccgaggacctgcaagacctgggggtacgcttcctgcagcccttcgtgaatctgctgtccaaaggcacctactggtggatgaacgccttcatcaagactgcccacaagaagcccatcgacttgcgagccatcgggaagctgcccatcgccatgagggccctcaccaactaccaacggctctgcgaggcctttgacgcccaggtggtcagtgggggcacagccacaccatctattcactgccttctggtttagggtcacagagagggacctcaaagggcattaggtcaaaatcctggtgggacaagaggggaaactgaggctggtgaggggaagaagcttgccttaagtcacacagtgaaccagggacaggtgcagggctgaggattcataggacaggcacagttggaatggcccttaccgtttaggtcgtctagtccaaagtccttatccagatggggaaactgaggctctgagaagggaagtgaccccactggactctcacatccctgtgctctttcctctgcagcttactgactataaaggttggagtgttcacttgatttggagcaggggtgttagtggcctgatccttatggtaactctatgagttgagccagacaggaatctccccatatcactgaggagcaaattgaggccctgagaaaggctgtgacctgcccagagctggccacagctggcaggcggcagaggcagtctcctggctcccagtccagtgctccttcacttcctctgccctcgcaccagggcagttgctgaggcagacacggtggcaggtggtaatgagtgagtgtggcacatggccacctcctcattccagtgctgtgctcatcacatagtccctgaccagctgtgtgaccttgagcaatcatctggccttagtttccccatctagaccatgttggtgttgatagggccctcccaactgtgcacttgctgattccatgatctcttcctggagttcacctatttgcagaggatgtgaccactgggtttccccagacaacaggagctaggggcatcctgggaggctaggcccagccgtgaattagccctcaggcactctgacctggccatggtctctctgggcagcggaaggacattcagggcactcaaggtgcccgggccatctggcaggcactcagccatgccttcgggaggcgcctggtcctcagcagcactttccgcatcttggccgacctgctgggcttcgccgggccactgtgcatctttgggatcgtggaccaccttgggaaggagaacgacgtcttccagcccaaggtaggcagccccaggggtagggtaaggcaccctctagatggttttcagttgtttctgagagtgcaacaggccaatgtgtgtgagccatggccacactggagtggctcctcacacatgcgcaaagcccatagcagtatccccaccacagaatactctacatctggtcaacagaaatgccagagggcgagcctatgccccaagggtatcctactctcctctcaccgtcactaccatagtacctctcccggtagttaggtcagtccgaaaactgcaggaagtgcttttgtttgtccagtgtctagagcttctgtgacttggatttgttggctttcagttcatgtcatcttagtaaactctttaaaagttttcaagatctgtcttcttcagtcctgtaaaggctggcacttgagctttctgcaggggcatcttgggagctactgtcagaggagagagaagtgggaaaccctcacgagtggagctttgtctctccccactccaaatttcattcaaagctgcccgtagttttattaatatgttggacttttccattaaaatttcttttttaagaaaagtttccatggcttaaaaaacactggagacttattagactagattatatccaatggccttggcagttgtaacgattctgcaaactgaaatttgttggagctagaaaacctttccccggggttatttgccctgcgtggggccgtagcatccacttcgggggctgggcagactgtgctctgttgtctgtttccttgcagccgtttaggtttaaatggccacaaaatgaaaactttttcacccctaataagtttcagagttttagtttccaagtgaggatgtcattataacattttaaccacagacagtctgaaaataatgcagagaatggggaattagggtttttaataatttatgacaccctttgcgtaacatttgttcatctcatgagctccaaaatcgcagccagcagttaatcctcaggaggtttatgttcatttttctggagacataattagtcagctgaacagttttggccacagatatgagatacgttgagtctgatttatgcagcaaactttcattgaacactgctgtgtgccaggcctgggttgggctgtgggaatatgaaagcaatagttatgatgaggatgattaacaatattaacagccacttactgaccacataatacatacctggctgtgtgcaggagttatccatgtgttatttaatccctaaaactatcctttggcgtgagtatattttgcaacatctttactgtggtatacctcaaatactgtacagtttatgagatgataggtattcttatccccattttacagatgagaaagttgaggctcagaaagtttaagtaattttccccagggtctctcagctagttaataacagaggcagaatttgaacacaagactcactccacagtctgggcatttacagccaggaagctaaattgactattattatcaagccatcacctctggctccaaggattatgaaatccaacagtgaggagagaaatcaaaataaaatacttttatgctatgtgttacatgtgactcttaggaggaatattcagggaattgtgggaaaagatagtgattaacttagccagtggtcatgaacagcttcatagaggaggggatgtttgaaaggggtcttgacggatgagtaggaatttgccaggctgccatgggaagatttcttgctcaaccaagaatgcaaggaccacttttgcttatttaaactttgatggcttttgaagccatatctggctttttgagcctctctactttacctggcccataaaagagaggggaagcggctgcttctcttgtctacaggagtgtcacctttggctctagcctgaccataggctaccccagaatacccccattggcgatcctgaagcagcatggagccagttgttaatatcagggggaaatggcacaggccagagcccttatcagagtgtccacaccacgctcttcttcctgtgtttcccaaaacccttgtgggattctgctaaggagagagctctgaggcaggacgtgccaaagagatggcgaaagcacttagaattttagttcatctgaacgttatcattgccgtttttttctctttgtttatacacaaaccctggggtttattaccgtctcattggaatgctcttgtcccagttacttagcacacaaatccctgagacagatggccctgcctcagtggcagtgggccttatcagatttaatattttttccctgcagcccaaacacaatcagaaaatttccgacacagaaacaagagttgaaagtaaatatagtctccagtgtccgcaacaaagaactctccatcatgtggttgcctgggatgtggcttaattctcatgtgggcttctgagctcagaaaatgggggaaagggatcatttactgagatcatttggttcatctcccagcccccaagccattctaatccagagagaaccgagtgctattctggtctttatgaatgacaaagaaggaagctccctagctacatgttgcagtgtttcacagtctgggagaggaagccgttttttctgcccagcctgaatccatcctgcagcagttggcacagcgaggcacctgtggtttattcatcatcactcttccttcctaagatactcagagttggcaagaaacatgtcatccttggtatccgcaaggacgaacatttctgatgtcctctttagttactgaaagtgtctgtgacttgccagatctttgatgctcctgtcaccccgctgccactccccagggaaagctgggacccaggttgggctctgcctatgatctatagctctttccagcctcctctccaacccaacccctactcccaatctgtcacctcccatggatgccactgatctggctgaaggacaagagaattagattcataatgagctgctggtgtctgaaacctgccagcactgccctgggctatcagttgagccaaaggaagaaggaacagtctgggtttgatcgaagggctaaagcttcaaacagcctctaagtctcagtaggaaaatgtgtaggtttgggagggtgtatgtgtttccgaatgagttcccctaagaactgcttatggttctatatgtgtgttctgtttgtccctgtgtcttttggtgtgtctttttctgcgtgtgtgtgtgcatgtgtgtgtgtctatgcccccgtttggattgccatatttgtggctatcattatgagtgacttaatgagtgtatatgcattggtgtttctgtgactttgtggttttgatgcatgggctggcctcttcataaccatgtccatgcagctggtctggcctagagtacctgccttcaattcactagctccttcttggccatcaagactctgctcaaatgtcacctgctccagggagccttcacctggttgaattagatgccccttatctgtgctcacataacatcctatcaaagcgccctgtttctttccctgacttgatcctctgtcccctattgcctgacctctgtgtgcccagcactcagcccactgcctgacacccaggagatgcacgggaaatggttctgcaaagaaggaataatgcagcaattactatatattgagtgcttacacttactgttttttcacatgcactgttacattgacttctcataacaactctctgaagtcccttcatagcctcaccttacagatgaggaaactgaagctaagagaggttgaggaacttacctaaggacacagtggctaatatatgatgagtcaggacctctaagtccaggctcttaaccaccgtgtcaaacagtcttgtatgaatgggtaggtgtgttggtctctgggtggccaaagataattttattctttacccagggcctcccggggctgggacctacggacaactcaccttttgacacctgccaaaataggaaacaagagtccaagtgatcccctctcctttaagcaccagagaacatgtgaaggggacctttccaatcatacctctggcctggcagagacaatggggctccaaactgtagagtcgggagtgctgggttttagtcctacctctgcagctaactcatttattctcctcagcagtcacattctgcaagcctcaaatgcaaaatgtgtaataacttctgtagaaagtacatgggggcatgaagatcattggcttgattgcttttaaaaaatcggtattgagcactactggggaaatccctggaaacaaacacaattcttccctgagagcttgtgaaaatgcaagactagggcctatgattttccaaagcattttcttccaccaagtgtcaggttgtaggtccttggtcttttctctcttgccttggtacctgcagggtgctgaccagtgctatcatatcccctccccgtttcctaggaccctcttctcggtagactccaacagggcctgccttccttgggcagcatggcaggcctcttggctagtctagtacccacttcttttttttttttttttttttttggatggagcctcactctgtctcccaggctggagtgcactggcgcaatcttagctcactgcaacctctgcctcctgggttcaagcaattctcctggcccagcctcccaagtagctgggattacaggcatgcatcaccatgtccagctatttttttgtatttttagtagaaacagggtttcagcatgttggccaggctggtctcaaactcccgacctcaggtgatctgcctacttcagcctcccaaaatgctggaattacaggcatgacccaccacgcctagtcaggtacccacttcttaactgaaacttagctattccaggttctatcccttttaaaccaactctttgaagagaggtctaataatgacccaatgacttatagctgcagtgagatttttattttaacaggtcacaaaattctcaatccacaaaagtagatttctgaccctaggttattttgttgggggcggagagaggaagtcaaaggttttgcagcctttagagctgcaaaaccagaatttgttgttttgttaaaaatgcacaaataccgacgagtatatttaagtaacacccatagtctaacgaacaaacatgatcagttggcttttccagccctcattctccagcctgtgtgttttctgctcattgtaacacagcgtgtgtgtggcattccatgtttctccagagctttcatgagaatcagtggtcttggatgcatagtgttcccatgagtaccttaattacctaaccattccctgtggttggaaatttatatgggtttttgcattctccttctgctctgaccccaaaataaatgtctgtgttcatacagctattaccttatgtgaaattattttctttgggataaattctcatgatgtgttgttgctttaaaatagtggactccagtctccagagctgcgtctctgcagaggacagtgggacagaagaatcccagggcatgttaaaaaggaccgggtcttcctaaacccacatgcctatatttctgacccagtaccagccaggggggcaagtttccatcccccacaagtcacaaacctgtaactgacactaggatgcttaaggtcaaaggcctggacgaggcctagacagtgggtctggggtagtgtttttgacatcactcaggttcatgttcacatgttgtccccttaccagcatgtgaccttgggccagccactaaccctactgaaactcctttttttcatgtatgaaatggggctaataatggtaccctcctcattagggtattgtgaggatagagttttgcacctgataaatattgtctcctgccccttcctcccctggaaattcaggtctctccctgcagcctaattttaaggcccatttttctgcttccagcccacccctgcccttctaccttcgacctcctccctctgcctctccctctggtgcactggcaaatgggacagagagcctcggtagggccttcctcttagagtcttgcacgcatccctcagtggtctccctgtggctgcttcctgctgccaccaacagatacagacccctgtcgcacagatcatggtagagacagtggtgagcaggaccagacagctccagggagcagtgagggctggcttagagaacctctgttaaactgagaggccaccatcaggaagctctgatccaagatccaggaatccctgactctagggaaaggcctccaatgagagcctgggccctctctgcctgattctgattgtggatgtgccctcaaactccttctcatcactttgttccatccctctttaccctgcagcagctcccacaccctgccaaacaggatgcacagtccagggcagtgtctgagaaagagcagagatctgtcttcatggaaatattgatgtggctctgctggggagcaatggatttatcaagatcaaagttttcctgggagttattgatgcttaatttggaaatagacacactgttgatccctggtatctttagcaacaaagttaaaatgtttgtttttcttcactggttgccatctgagatcttgccggaagtacacaagagaaccttaaatttaacaggaggccctgggagcccatgaggctggcgggcttgggtctgaaatcttttcagtctcttgtaagtgatgagctctcattctctcctgagagctctacggtgccatgttttccactggccttttctgctcagtaattgctacattacaggctgttggtaagttcggaacaagggagctgctgattccatttctgtagcagagaacatgcaccgtgagacttgttgtaccagttcaggttttaggtgctctatttattcttgccccattcagaatgctctcccctgggtctgtggccacaatgctaagagtcatatttatgggcctgcagttgtaattgggccccattctgttcccccaagtggaaagatgaacagggtgtaagcaaccttccctgtagttagaaaaacgtttagttggatttatcagtctgatttttcactcataaacaattgcacaagcctttgcaagcccagagggtcttgtaataatgatggccgtggtccattatggcacagtgatgtgttctacggtggtcattttgctggcaatgacagtcacctctgaacttctctttccaacagacacaatttctcggggtttactttgtctcatcccaagagttccttgccaatgcctacgtcttagctgtgcttctgttccttgccctcctactgcaaaggacatttctgcaagcatcctactatgtggccattgaaactggaattaacttgagaggagcaatacaggtacttggatgattattttttcactttgccataagaaccattattaggaataatgtccatgagtgttattcatcctcatggacactcaagaataattctgctgtaaatttattttttgttgcccattaacgatgttttaaaacagtaaccattgacaaggcagtgtgggatagtggaaaatatcttgggctgaacttgggagacagtgtagctctggctctggttctgccttggactgggtctgaaaatccagctgctcagcccttggcttgaaagtggtagacgtcactaattgatcacagcactctttctgaccaagggtaaatgcaaccttggaatcctctctaagtggctgttccagagttctgctaccagacagtcttctttgggtgtgaaaaaaggaatgtgcttgacatacaaggtctagatagcctctaagacagggtcccctctaagatggggtattggtccatggcctgttaggaactgagccacacatcaggaggtaagcagtgggagcaagcattactacctgagctctgcctcctgtcagatcagcggctacattagactctcataggagtgcgaaccctattgtgaactgtgcaggcaagggtctaggttgtgtgttccttatgagaatctaatgcctgatgatctgaagtggaacagtttcatcctgaaaccatccctctcccccaggtccatggaaaaattgtcttccacgaaaccagtccctggtgccaaaaaggttgaggaccactgctctaagttctatttgaacccttaagtcttgctcactaatgagagtgacctatttggtctgttgggtcacttaagtctaggctcttggtcctgccttctgtgatttccttcttagagtttctggaaagatgatcaaagccagggagtgttcagggcccctctgaagaaggtgatgatgagagttgtccaagtcccagggtcttcactaggattttggttcagctatcagactagagagacatcctgattgagagtagtttaaatgggatagaagtttgtttattcttcagatagagtcagggctgacacaggagctactcaatgatcagagacctggcttcttctgtcatgttgctctgccagccttcttttgtgacttttgtctccatagccatggtgggtattgaaactgccactatatttacatttaaactagccagaagaagggacaagaggagggaacgcattttccttttaaaatggtaatacctgatttgcacataccctctcgcatcccattggtgagaaagtggccaaatggccgtatctagagagtctagaaagagcttggtctttattcttgacagctatatatgcactgctagaaattctctgtgcaaagaggagaatgggcattgggaataactagatgcagctatgcctagtgatgtccatgaagttgtggtaaaatcctgaagctaccttgttctttggaaatgttcctcagaatcattaacattagtcatgtgggagacaggagaagaagctctgcagaaaagggaccgagaggacaaggatatagcttgggctggggacaatgtcagagtccaaactctggctatcttggaatagtctgtgtgaacggtgccctcccaagttgtgcagtgcacaacctgtgcagctatatatggcaaccctgcccatccccagtggtttctcactgggaaagcagagtatttcctcagggatgtcattatgtgacaatagtggaaaaagcccaggaaaatctaagaccttctaagactcatgggggcccagagctgggaggaaccaagctgttgctcagttcagaaaacttctctagaaatcccagcctctcctcacacccctccagtgacaggcagacttgcaccaccacaagcaacagccacttttgtggttgggcagttttgtaattaaatatactaatgtgtgtatgtcataaattacattttccaattatgccaaaagagccaaaaatggttttttaatggttagcatataatcgtttttatcaaattgcttgaatctttcatgttaataagagagattcattactatgccacaaaaagcaaatactggcattaattatagaaacaaattaggggggtggagcgcaatggctcatgactgtaatcccagcgctttgggaggctgaggcgggtggatcacaaggtcagaagtttgagaccagcctgaccaacatagtgaaaccccatctctactaaaaatacaaaaattagccaggcatgttggcgtgcacctgtagtcccagctactcaggaggctgaggcaggagaatcgcttgaacccagcaggtggaggttgcagtgagctgagatcgtgccactatactccagcttgggcgacagagtgagacttcatctcaaaaaaaaaaaaaaaaaaaaagtggctcatgcctgtaatcccagcactttgggaggccaaggcgggtggatcacaaggtcaggagatcgagaccatcctggctaacatggtgaaaccccgtctctactaaaaatacaaaaaaaaattagccaggcatggtggcgggtgcctgtagtcccagctactcgggaggctgaggcaggagaatggcgtgaacccaggaggaggagcttgcagtgagccgagatggcaccaccgcactccagcctgggcgacacagcaagactctgaaaaaaaaaaaaaggaaagaaagaaggaaaggaaaggaaagaaaggaaaggaaaggaaggaaagaaagaaagaaaggaaagagagagagagaaagaaagaaagaaagaaagaaagaaagaaagaaagaaagaaagaaagaaagaaagaaagaaagagaaagaaagaaagaaaaagaaaagaaaggagttagggagaaaaaaaccctttctttctttcttttggagatttccggaaaatgtacccttacggatgagagcctgtgtcttcatgggttagagaataaccacgctttgtgcataaaaagttattaagcacaattcctgaattatacataattactagctgtcagtcagttgtgcatttctgtgtatgctggtcttcacttaataagactttatttcacagatcacttggtgtccctacttcactgaaactaggtgattatcttttgaagtctcatttcacataacctaggaggtatatagatttctttaaaaatgtcattgccattattttaaaccttacccatggtatatataaacttacagaaagacagaataggttcattattttaaaccttgcccatggtgtatattagctcacagaaagacatagaataggttcctgccttaagaaaacctgacccacaaaaaagcctgggtttacacaaaagaggaattaagggcggggagcccaccttacaacagaatgaataatagaattttatccaagagcaggcatcctgaggacatttaagacccggatgcatttttccttgttcaagagcacacatccaaaaattgcagtctttctgcgagtcatgatcactctgcacataaagcgtttaggttcagagctcggggaggccattaccatggctgctctctgtctgccctgtgagggtccttggggtggctgcactctggggatggtgctggggctgactgactcacgcggtcgtgtaacacatcagaccttccaaagtcgaacccttgttttgtttcaaggctcaattatgacaggacttggtctcagagcagatcccctccctaggctggagaaggccactttaaaacagatggcctgccccacttcatcatttttatggctctgatctgtgttctccactggcctctggtaaatcaagaatacaagtggacatgaagatctgctttaaaaaataaagaacagaccgggtgcggtggctcatgcctgtaatctcagcatttggaggccgaggtggatggatctcctgaggtcaggagtttgagaccagcctggccaacatggcaaaaccccatctctgctaaaaatataaaaattagctgggcatggtaggcacgtgcctataattccagctactccggaggctgaggcatgagaattgcttgaacccggaaggtggaggctgcagtgagctgagatcatgccacttcactccagcctgggaagcagagcgagactctgtctctaaataaataagtaaatgaattaaattaaataaaaataaagaaccaattaagtcctgtctacaggaaaaggccttacttgctggagaagtagcttgctgtgctggagtagactagtaagttggaacggtgatacagtaccaccttacagagctgctctagggcaccatggggactgtctgagaagcccctggcacactgtaacaggtggcatctggtgtggtgatgatgatgagaatgatgatgaatgtgaaacactctgctctcatttctagaccaagatttacaataaaattatgcacctgtccacctccaacctgtccatgggagaaatgactgctggacagatctgtaatctggttgccatcgacaccaatcagctcatgtggtttttcttcttgtgcccaaacctctgggctatgccagtacaggtactagatgggctgaggggaagggaggggggcagcaggacacacaaccagaatctgctggtccatggccagtaactaggagcacaccgtcttccactccatgcttgcctgtacctttcacacacttggctataccacaggctgtacctctgggtccctcctgtcccatactctgcaagcactgaccatctctcttaatgaccagagaaggcagtatcattaagactttaaaaatggagccaactttataaactatagaaaaatcaagccaggttcaggggctcacacctgtaatcccagcactttgggaggctgaggcaggaagattacatgagcacaggagttcaagactggcctgggcaacacagtgagaccccttctatgcagaaaaaaaaaagaagaaagaaaagaaaaatcgtacatggaatgcccacagatcttaaaagctatgttgtagcaaaatatttaattacatcaaaaagtgttagtgatgtatttttaagcaaaaagagtaagttacaaatagtatatgttgtatgcttactactaaactggaatatatgttatgtatacatttgtacagattcacacatgaaaaagaattggaaaatcacatagtgggattataagtgatttttattttctttatgtgtttctaaattctctaataagcgtgtataagatttggaaatcaacaacatgatacttttagcctaggcaacaaagtgagaccctgtctgtacaaaaaattagctggaagtggtggctcacaactatagccccagctactcagaggctgaggtgggaagattacctaaagtccaggaggcagaggttgcagtgagctacaatcacaccactgcactccagcctgggcgatagagtgacaccttgtctcaaaaacaaacaaaacctggtgttttttagccagatgtggtggtgcgcccctttagtcccagctacctgggagtctgagatggaaggattgcttgaccccaggagttcaaggctgcagtgagcaatgatcacgcccctgcacttcagcctggacaacagagagactcctgtctcttaaaaaataaaaataaaaacgttaaaacatggtatttttttaaagcaagacaacctttggtgctggctcaggaagaggtacattaccccccaataatcagaggagaatcgtcagcatgattgatctgacctcgggcttcatgtgtcccatctcccacccggagctcttccaccacagagtctgatcctgtcctatgcctgggactaaatcttcaccctggtgttcaggccagaaaccgaaatcccagacccattcccagagggcgggaaggttccaccgggagagcttgatgtagcagaaagtgacttgggtgagacaggctgattcaaatacttaacctctctgagccttggtttctttatctatgaaatggggaggctgcccaccctctggagttgctatggcaattcagttagataatgtaagtaacacagcaggcagagtggcccccagagtcttcacttcgtaaatatcagatccctctaccttgcacatgtttggtatgagtgaggtgttaccaatccagaatccattgcttcttgggataaagattccataaaccttcatctccagtgatttgtattggtcctccttacttgtaaagcttagagtttaaaaatattaaaagaaaaaaaggggagaggctcccacagggacacagctagacaagatgagatgcagggaatctgatgttcttttttatgggaacagtcatatatgccatcccccattaccacctacccatgcccagactgcccccgctccattctgccaagacagatcaatgactataaaagctacaaaagggcctggagatctcatctagtttagttaccaaccaaccttttatgcacaagactttctaagctgggtgtggtggctcatgcctgtagtctcagccactcaaaaggctgaggtaggaggatggcttgagcccaagagttcgagtccagcctgggcaacatagagagacctcatctctaacacaattttttttttgaaacatgaaaaatgaagatttctgaccatgcttctctcattagttaacactttgggctgtgagggtctgatgcagagagacacagcctgggaggatcctaacatgtacacagcattcaaaaggctacaagacactttctgttgtgtccccttgaacaagcagtttgtaagattttgttggccaggcatggtggctcgctcctgtaatcccagcactttgggaggctgaggctgatggttcacctgaggtcaggagttcgagaccagcctgaccaatatggtgaaaccccgtctctactaaaaatacaaaaattagccgggcatgatggcgtgtgcctgtagtctcagctactccggaggctgagacaggagaattgcttgagcccaggaggcggagactgtggtgagctgagatcgtgtcactgcgttccagcctgggtaacagagcgagactcggtctaaaaaaaaaaaaaaaaaagaaatcaggttttgtctactaaacctgctgcacggttaccgttactagtactcacagggtttgttgcacatgcatcgttgctaatagtgctaactaatattaacagcccttgccctatgcctggccctgtcccagcccccctcccttgtataatttaacccttgcactgggggtagagattttcatatctactgatttcttacctttgctcatttatcatggagtgtcctttggttttctgtgtttgtatatacctttaccacttatagatttgaccagcactcaagaaccagtgttactcctgggagttaatacaatcccagccccatggcaaagaaactcatgtggttaggattctgtgtgcagcctggttagccacagggcacgtaaggctttttataatattgacatgagtgcagaagccccattcccgtgtaagccctgagggctcttgtttcataatctttttttggtcacatgcacacagctttattgagatataacccactcatttaaagcatacaaatcagtgggttttagtgtcctatattcacagagctgtgcagccatcatcacaaatgtggaagttttcatttccccaaaaagaaacccgtacccattggcagtcactcctcatcttcgcccccagcccttggccaccgtttatctacacatacttttgaaaggctagtgaaactttctcagaaaaataaatgcttgctcaaacatttgggctataatttcaggggcttcatgggtgcccccctgacatttatcaagaacaccaggttaaggaatttagctataatggaggcctctgtgtttcccagtctcctgggtatcagaggcccagagagggcaggtgccttaccctgggccacgcagtgaaccagtggcagcaccatactcacacatctcctttctgcggttccccagtgacagagttctcaggaagctttttcatttattttctgagaggagggtaggccatcttgtattgatctccaactatatgccagccacaattctaggtgcttatcataaaggttcatttaatcttcacaatagtcctgcagagtggacagagtccttcagagtgggcattataatcaccattttaaagatggagaagctgaaaaccagagaggttaagtaactcacccaagactgcacagcaaaaggctggggctttgaaactcagggccacagactccaaagactatgtcctccccactatgctagatttttttcctaacctgtgaataggagacaaaatagtccttttatttctcacagttgctttgcacactcagaatccatgatttcttctgcatgagggccattcagacctgtgcagaagagagtaatggaccaaggagtcttgggagcacctaggaggaggggatgggggagcatgaggaggagccagggaacagcagcagctgcagcaccagctcccaccccagcctctgccagtctcttggaggtggtgtgggtgcagacaccggctcacaaggtgccctgttagtgagcttggggtgccatgggagccttcttgttgtcaggcccaacccaagctggctgaagaacaccctgatggcctccatttgagcacaactaatgaaggactggatgccagagataagtccaggagggtgatgctgcagggcaggccagggaagagggtacttcatctctatcatggtcctctgcccatccatgccagcatctaacacctgttaaacactgggaggcaggtggtgaaggggccacttcccagcctctaagatacctcctaagccaggaggcattctgtgattaaattacagggcctcccacttactcctttatccttgaggcggtgctggaagcttaatgccaatctggtgtagggctctgggactacaggaccaaggcaagcagtcctttctctctctctctctctttttagctaaggaagccagcacatctgttctttgagaaaaagccctgtatttagaggtgtctgcctttgaaggcaacctgagaaactgtcatcttggcgctttggggactggccatttacacttctcataaatattcagaagtaggcagtcatttacataaagctaaatgcagaaggaattctcttttcagggaatacctggcagattcattaaaaaaattaaagaaaccaagagcataagaatgaaaagcgaattctcggaccccaggctggttttttctggcatgggtgcagtaactttgcctctttgctcagttatcacttttttccaatgacagtaaccataagccctgagagccagcaaatagaacaaaaggtgctgtcacaaacattgtgcaatctcatctctgagatttccatctggaaaatagactggagagagttaaggcttcaaccagccttgcagataaatgcagttagttaccagcccagcaaccctctgcttgcatgagagcccattatgctaacctccttttgaaattgctttgtttctcctccttccctgcactccactccccaagataatttggaaacctgggcaccaaggcttgtcccactctaggggactggggaaacagggattttgccagcacctcctggcagggcaaccatcaggtcaaagggacctgacccatgaccccttcctcagatcattgtgggtgtgattctcctctactacatactcggagtcagtgccttaattggagcagctgtcatcattctactggctcctgtccagtacttcgtggccaccaagctgtctcaggcccagcggagcacactggtgagtgcccaaaggtgtgtgtgttttgtccctcttcccctccttccctcgacagcagcaggtctcctcccacacacccacactgtcattgactttgactttgactttgagtaggccacttcacctgtccaggcctcagcttctttgtctgggaaatggagtcaatgggggaggaggctgcctcccggtgaggacaggaggcgggcatggcagtgacagtattgacactcaggccttcctctcgggtgggagacggagcagaagcctctcccctctgactcggggacccctgcaggagtattccaatgagcggctgaagcagaccaacgagatgctccgcggcatcaagctgctgaagctgtacgcctgggagaacatcttccgcacgcgggtggagacgacccgcaggaaggagatgaccagcctcagggcctttgccatctatacctccatctccagtgagttcaccccacacagccagccctgggtgctgctgcgtacatgcaaggagagggtgtcagagctcgggtaagagggggtgcagggacagaagcaggaggccttgagattatccgactcagtaggggagcctcaaactggctctgatagctaagctcccagaaatcaaagtactcttcattcatttatccaacaaacatgcatggaaagcctgctatgtgctggacactgtgctggccctcaggatacagtgatgaggaagagagatgaagtttcattcctcatggaactgatatgttattgacagacagcagcaagtaagtaaatgaccacagttttgaactctcctaagaatgaagactttttagtaagtcagactgagctgtcattgccctggggaagctacaagaaagcttccatccacttggggctatgcaaaagaaaaagactagttatccttaaatatcagaagcccaggctgaaggtactcacaggtgtagggactgaatttatattaaccaagtagtttgggaaccccaagccaaggaagaagaaaaagaccaaaactggtaaaagtcctagagtcccatatacttgaaaccattttactgagaatgtaaaacttttttttctttttttgagatggagtctcgctctgtcacccaggctggagtgcagtggcaaaatctcggctcactgcaacctccacatcccaggttcaagtgattctcctgcctcagcctcccatgtagctgggactacaggcacacaccaccacacccgactaatttttgtatttttagtagagacagagtttcaccatattggccaggctagtcttgaactcctgacctcgtgatccacccgcctcagcctcccaaagtgctggaattacatgcatgagccactgtgcccagcccaaaagattttttagaaattgaaattttagttatggaaattaattcagtgaacaatggtcccctggtcagagtgagggcttacggaggtcaggtgatccatggagtcctggcccaagtttatctcacagttggtctcgtggctccgtggacccatcccatggtggttacttcccaagtgcataattgggatgtagatatttagcaaccagctgacttcacactagttccctgacctgtccagtctaagagtcattatggccaagtggaagcccctggaaagaagaaaacaaaaaagaaaccaaaacttactcagtgcacaggttacatgaatgagtatagctgaagagagaatttttgaattagaagacagatgagtggggattacacagaacgtggcaaggagagtaagttggtagaaccattttacagatgggaaattaaggccagaggggagtgtgttcctgagatccctcctgaggttagtagcatggctcggactagatcctccaaagtctcttaactcctggtctcaggctattttccacaaagagctgggggcctctgtggggtgaagaagacttaggacaccatggggcaccattatgaggccatttcctcctaggagaaaaaaaatctctgggctctgaaaggagtagaattagggtaggaaattaagagaggctaccgaccacctcctccaactaaaattggttcttttggtgccaggaagagacacacctggtgggggagggaaggtggtaatggagggggtgctggtagtgtctcccagatagacccatccaacaagtctcatggagaatgagacggtcactcaggtcatctgcgtattcttggcattcttgctgcctagagagagagtctgatggagctaggtggccaccaagctgtcccactccccaagacagtttggaaacatgggcaccaaggcatgtccctgtctaggggactggggaaatatcccatagcagtgttctcacagtatggggctggccatgaataccccaggagtccaacctccctttgtccagctagaccatggtgtcctatgcctcaggcagggaatgtggtccagtcatcagtggctgggccgtctgccatacatggtgcaagccatggcgttttatgcagaaagtcctgctagcatttgattttctcagaatggagctgtgagcatggcaggcaaccactgtttcctggattcttcaccaagacaccccaagttcctggtctctccccgttatcctcatccctgaccctgtggttctcagagcctccaaacacactcaggctaagcactccatagacaggggaaatttggaaggaacatctagggagctcagaaaagccaatgtccctagccccaggcccacttcaaccttctctctgtcagtcctgcctgcccctggaggctggttacatgaagagtaaccccctgcttgtgtatagccccccagttttgtacaggtttagagacagttcccagcagtaggaacagctgccgaggtgggagagggcttctcccgatagccgggggacttcctctcccaggaacaacagggtggggtagagcaggcttgtcgttgctgagatagagagagggaagggaaacaacaaggaaagtgggggcactgggtccccaaggttcctggcacagcaagcagtgaagttggggcagcctcaggtcatgtagtgggggcaggtgacatctgctttgactgctcctaagagatatgtactcatctcctggattccaaactgcagcctgggacatgttttcttatataaacagcatcaaaagatgtgtgagttcccaggctagcccactgaaccctacctagtgggtgctcattgtcccccagagcccccagaagacaagccgtggctttgtgatgggcctggggccaggaggacctagggatatgttgtgaagagctgagaagactctggaaaaaaggggctctggagccaagcaggagcccgcccaggactcctcacgtgtccaagtcacctagggagagaaacagagcagcccaggttggtccctggaagagagcagcggaggaggggaaaggggagagcccctggggagagctttgaaagtcaagtgctgtttgctcagtgtgtttgcctttccgaggatgtgtttttttttccctccgttagtcagcagtgggagggggagagagacgggtggtagggtgcagggtacctcctggctgcaggcatatgctttgagtgcgtgttcatttacctcctctggacttcctgccttctgttaccagggatcaagacacaggtcattaggcgtgaggtaatggggcatctcttgttctgacccctggcgccagtcttggagtcctgacgctgcagaggagccccagagtcacatttcctgttggggcccatcctgctcatatgcggcaccatcagacttctgggcaggcaagattacctgtgactctgtctgatggtctcgccatcaatatcactgagagtagctgtgtatggagtcccgaactggtacaggataaaacagggggctgaaaagggaatgaatgggcacagtttctctggcatcaaaagtcacatccagaattgatatttcctgttgagtaaaaatagaaatataagttgctcagtggatgttgagtgagccctattcatgtgccccactctgtgccaagcaccaggaaggagggaagggaaaaatgataagatgttctccccgttctccaggagtttatgctccactaagaagtcagagctaacatgcacagaacagtgtggcagcgagagcagaaccgtgtggccagctccatgcttgccgcctagcaagcgtgattgcacttcatcctcataacaacttggtgaggtgtgttgctctgttgtcccattttacagcagagaggactgactctcagtgaattgaaatgtctcagtgaggtcttccacagcaaaaggcgaagcacagagaaggaagtccatgtgggctgggagttcacccagagattcatgtaggggcaatgtgggctgtaccttgcaagatggtgggatttcaatgaggagaagacaaagtgggaggaagctggagacaaggactgtggtctcttcctttagaagtcagttcaatctttttttccttgtggaagcagcataactctaggtggttcctctgtatctgaggacaagctttgtagaggtgacaaaggggtcctaggtcctatcaggcaagcactcgatatgctgccagttcattctgtccattgtgagatacccattccagagcgcttcctctgtgccaggctctacggaggttctggatgttaaagaggaagcaggcatggccctggccctcccagtcttgtgggagattgatcatgcccatgaatagtgaccatgtggtcagagccacagggtcaattccaaatgcccctgtttctcttttgtgttactcacctgactctgggtctttcgtttcttccattcattttttttaaacaaatatttcctgcccaccttctgtgtgccaggcctggggatgcagtgggagaagcctctgtcctcctcagtggaggcgctaactcagaacaggcagtggagaaaaacaacatgacctggagacctggtgccccttccttccccagcatctttgaaattcttttggttgttgttgttttgagatggagtctcactctgttgtcaggctggagtgcagtggcgcgatctcaactcactgcaacctctgcctcccaggttcaagtaattctccctgcctcagcctcccaagtagctgggattacaggtgctctctaccatgcccagtaatattttttgtatttttagtagagacagggtttcgccatgttggccagcctggtctcaaactcctgacctcaggtgatccacctgccttggcctcccaaaatgctgggattacaagcatgagccactgtgcctggcctgaaattcttcaatatctacctgcccttctgccagttggtgcagccacagtgggctgcttatgcatatcctggcctggcttggtggggagcatggctgagggagagccggggcacccatcaattaaggaggtaaagatcagtctgactgagatgcctcctgccacacttcctcagctgccagcaactgacaccattaacctgatttccttccccctctgttgactgcactgactattggactgaatgggaaacagccccgtgcacctcaaaatgcacttcccctcctgcagatgcatcttgcaattaggcccaaactgtgagcctgcatgctcctcccctggccctgcacaggcaacaaagctgaagttaatcagaggtacaaatggctggctatgcctctctgacacgtaacttctggaacatgtatcaatgctttggaaatgaaaagctcctggtattgcaatgccaggctggtgcccataagggccagaaaacattccttgggcaaagccagggggagtgggtgatctgatcccagctcaggtttgttgatttgttgttttgtttgtttcgttttgtatggggcaagggttgagggtatgaaaaacttacactatcatttactaccgtagtccccagaacccagcacaccagcacaaggcctggaacagggataccttttttgaatgaataagtctttttttttttttttttttttttttttgagacagagtttcactcttgttgcccaggctggagtgcagtggcgcgatctcggctcactgcaacctccgcctcctgggttcaagcgattctcctgcctcagcctctcgagtagctaggattacaggtatgcgccaccacgcctggctaatattttggtatttttagtagagatggggtttcaccatgttggccaggctggtctcaaactcctgacctcaggtgatccacccaccttggcctcccagagtgctgggattacaggcgtgagccactgtgcccagccttgaatggataagtcttaagggatatttttggaaaggatattctaaaaaatacccatgtctctacactattgcagaagggctttcagttttgatggcagcctttcaggccagcctacacgcaactaaacttttccataacagcatcacacttacacaagaagaaggttttataatccacttgccattatttaacatagttcttcctccttaactttcaagatctgagcactataatgttcttctttttgtttttgtttttttctaaatcaaattaaggtgagtcacctcaccttgggcctgagttggacagaaatctattcttggctatattccccacccctccaccaccttggaaccttatagaactttatgtggttcaggaaaatgagggcgaggcctcagatcttcaacccatgacagctgtatgcccagctccctgccttcctgtcttacccccagctagggcacaggactgactattgtgcccagagaggtgccagagcctgtaacaaccccagacttcccaggtccagccacatccaccccagagccccaaaagatgatcttcagagagacctttaaaacacaagtagctggtcacttccatccagaccagaacccaagatggctgtgctcttgctgagacatgttggttgtcattgcctccgagcccactttagccctcagctctgtaccagaaatgctgttcctttgggaatcacagccaaagaagagatggagcagttctggaataagaacacaagttcaaactgtcccatatctccccacatcactatctacagttggtctcttcccatggcgatgtccatctgccaccgtggcactggtattgctttgagtgcaggggtctctctttttggcatgttggccctgttactccctgggaactttgagtcttatttggaatgcgtgaagtccctgtgtccggggccagcactgatccacacagctaagtttgcactcatcttccctctcatgtatcatatctggaatggggtctgacacttgatgtgggacctaggaaaaggcctgaagattccccagctataccaatctggagtggttgtcccggttcttactgtactgtcctctgtagggctggcagccatgtgaagaacagaggttcccagcatcatcttcctacacattattacattcacccatctttctgtttctcacttttatctccagcctgggaaaagttctccttatttgtttaaatccttttgtgcttttagatccccttggagcagtagagtaccttgtagaccataagagtggaaaagggtctagttttctccttgtttctaaagatggggtggctgaaaaaactccccttttttgcctacagcttgcctctctgggcctagaagtggttattctgtctccatattggcctttgatttgtgctgagggtcagcttttggctccttcttcctgagacagtggaaacaatgccagctgtgtggcttctgccctgggggctgggggtgaggctttgggtgccactgcctgtgggttgctggcttaaaggacaattctgttcattggtgagagcccaggccattaacacctacgcagtgttattgaaagaagagaggcgggggtggaggggaattagtctatcccagctagagggagataaagagggctagttagttcttggagcagctgctttgaggagaaaatgtatagcttttgacacaacaggaagatccagaaaattatcattgaacatattaaaggttatttctttttcttgcaaaacacacacacacacacacacacacacacacacacgcgaacacacgcagctgatgattctactctcccagccccagccctgaaggggacccagaactccctgcacaaaggctgtccttcaaggggagggtgaaagaagtggaaaatcacattttcattctttagcgtctccatacaacagccagaactgggcagaagctaattatatcagaagcatactccatgttgctgcatcagctttgggatgttcatttttaaatttatttatagcttgtctcattcctcaaaggagttcagggagctacaaaaataaagacaataaaattgaaaaaaattaaattaaaaaaaccatgaccagggaaaatgtgcagtagaatgaagtgtcaattatcacgttttctgactgcaaaatctcccccacggctgatgcaccatcatttactacaacagcccctcttgttggacatttccagtttatttcgtttgggatggtttgttgctgttgctgtggttgtggttttgttttattgaattttgtgttagctgcagctaataccatcttgctgatggctttgcgctgctcttgaatgattactcaggataaatttcctggagacggattataggatcagaaggtctgaacttctgtgtggctctagctacaaagcaccagattgctttccaagagcgttgtagcaatttataatccaacactcagcctattttttggctgggagtcaagccccagaatgtgaaggaggggtcttggcctggagcaggggctgagggatgggtgcacaggacccctccttattggttatttatggggatgggccaggaggagcagaatagaggcccctgccctcccagttgctccttggagtgactgaccccataggggaggggcgaggctacctcacatttagaactatgtagttggtgatggtcaaggtcctaggtctgatgggcatcctcctccctctcctcctcagccagtaatggctgcactatgtcgtatgtcctagatctgggtcccttttgctgtgggaacaccaataatacttacgctgtttcctgccggaaacggtgcaggagggctgtggcatggtagtgggccctggaaaccatctagccttcatgaggaagggcagttaaagcacaggcatgtatgatgttggtattgattaaaagcctcacgggcagagaaattcgccatctgccagggccccagccatacgagggctccagccatacatcctccaggagactgggacctctccaattgcaggagccttgccttccccatcagattaggaattccccgaggatggggacaatgtccttcccacctgcttgagaactcctaaggggcatgtactctgtctccccattgtatctggaacttcctgggagcatagctcctgtctccgtcctcagactgggaatcccctaagggcagaggccatgtccttccacccacttgggattccctgaagttggggaccacatctctgatgtacaatgctttgtatgtactgactgctgcaggattcttggagtaaatgggcagtcaacttcttggactggtattgaccatctggacttcatcagagtgtccaagactttgccattcattagacaggggccatgtgcacaggcagagccctggcctctggcttctggctcctgactcctggtccctctgctttaatttggctaatggcagaaccagactcctttctgggctgccctggaaggggatccttgaatgaaagaggatagatgggaaggtggcagctgacatggttacctcttatgccatgggggggctgctctctctggaaatttaggcctggggtcagggcactgttgagcattttacaccctaggccagaggaggggtgacctgtggagcagggctaagctagtagcccatgaggtatgatgtgtaggcagcacctggggctcacagagcctgttacccatgttatctcctctgaccttggaaagagctggggtgtatgaacaagtatttataagtttacaaaaatcatatgaggaaactgaggcacggggaaggtaaatgacatgccctaggttacacagcttataagtagcagggattctgcccttctgtcacaccaagtcccactgtcttttcttcctggagtccctgtgactgatctaaaggccacatgtttaacagaataaggaggaggcctctgttgcagcaaaccagctaccccacccgcacacagactctaagggacatcctgctttaagctgtccttagttactaatacctcagtgagaatgagtttgaaattttctcaagagccatgggagactaggaagtctctaagcttcatagagagcctggcttggggggacacaggagccaaaggcagaggaagaagtggcagctttgtgcccccagaaacacgtgctcctgacctcacagttggccacagccagccaactctcccatccttctcccaccactttcccgtggggctaacttcaccctgtccacacggagtgacttaacagtttaagccccagagtcgggggccggggtacctgggacaagagtcctgagggaaatggggtgaggaactggaagtgccacagggctagagttctgcccctagcctactggagctgtgccccacaggctggccccactggactgcgctgcctccaagccatcctgggcatctccatgtgtagctgtcacgctcctcccactaaacgcctccctgtgcttcctctgcagttttcatgaacacggccatccccattgcagctgtcctcatagtaagtggatcctttctccatctcttgggggtagggtggagggggagggcgtctgcagtgacaggctgcccagatttggcctttctgcacaggggcctcagaagacaggctccacagccagactgaaaataggatcgaaagtttatagagggtgtggcccctccccaactccagccgaacaggggcctctgcctccaggcctggaagaccggaggcttagtatttagagaaattaaactttcttttaaaaaatagctatccaaatttttaatttttaaagtgaaacatgtgtattgtagaagtgatgggaaatccagaacagaaagctcaaagagaattaaaatcacccataatcccactggtaacatttttaatgtgtttctttccagtctttttttaaggcctatgatatgtcattttctacaaaaataggaatgtgctatgcatgcagttttgcaacctgctcttttaaatttaggaatatgccacacacaattctccatgccactgaatattatgatggtggctttctaaagcaattttgataaaagctgtgtgtgagctgagccatgggggtcaagcagcatgctcctacagaaaggcctgggcccctacgagcctgcagccccctcacccagcctcccatccccatcttctgtgatggctgcagttccttaaaaagatctgcttatttcccccggggccagtgtccctgagctgtgtagagttcacagcctgtcggatacacttgggaattcacttccaatgtgatgtattgagctggttcctggcctggctcctgggggaactgtgggtaacagaggccactgagccagccaggtggctggggcaaagcactgtgcagtttcgtaatcactctgtttacgttatcccgatgaggactggggagatgagcaccccgcctgctgtctgcagagggggccgtgctgacctaacccgagatctcctccctgcttattcccagccaagactgggcaggacagggagtcttggccaggacagggagggagcagcccctgctctccagcttgaagtcctgaacttgttggggacgtttccatgagatgactgtggggatgatgaaggtgtctccaactaaaagatcctcttaggagcctgctccctgacagccctctcatttcccttccagtgctgagcgtttccagtgtgggagggacccacaccctgggccaccctggcctcacttgtgcctctgtccacagactttcgtgggccacgtcagcttcttcaaagaggccgacttctcgccctccgtggcctttgcctccctctccctcttccatatcttggtcacaccgctgttcctgctgtccagtgtggtccgatctaccgtcaaagctctagtgaggtgaggggagggtccgggcgagggcactgggcaggcaggtcctgtgtcagcctcaaggcttgctcgagtgatggccaaaccacagctgtttggtcccggaacacacccccattgctgggccttgctgtagctggtcctggttggtcagagggacattggcctgtatggtttcccagctcgccatccctgagcaaggacttgcttacatacctcccaggagaggggactcactgtcactttcacgacaacttaaaaaaaaaaaaaaaccagtgttgagccaaatgtggaatcctcctaaattctacccactggtcctaacttcaccctccagagccaccaagaatgaggccatcccgtccccacgtggctgccccatggatatcagaaggcatccactgtgtctatctttcccaggccaagtatcccctaccctttccacagcccctgagccctcacagcctcagccagtgaaacagcttcccccaagcgctgggtcctgctctgattggcccacagctcttggaggctcccacttccaggctctagagcctcatggggactctgccactgtcccagaggcattgccctcttgggaatgaaagcctgaaggtagaaggctgaggctttggctgggaaatgccctgtctggagtgagaagatgtccttgggcctctgaagtagctctgcctccttgaaagcaagagcctgtcatgcctctatggagggctggcttgtccttacccatggccagagaaccagtcagtaacaaatgtcctctgtgtcttcagccttgaggaaggtgacacccctgtctcatgggaccctggcaggtactgggaagctggaaggaaggagtagctgttggaatgaagtagctgatagagagggtagcttgcagggggagactctagcatgggttcaaagatggaatggggcataactcagcaaaattatgctctaaggagtatctgaccaggcagtagctggttaaacagggattagctcccatttccacagtcggctgtgctgactcagtttcttgaccagggtgttgtggggtctgaagatcacccctcctcccaccacccactctccagccctatgattctgtgtagaaaccacagatttaagaacgctgcacctgcctgaaaactgttgcactgatcccaaagcgttcatattttcaaacactctggatcccactgtttccaggaatggaacaccagagtagcagaggccttttcagtgaggcagctcaggctctggctgaaggtgggcgcaggacactacctgaagcttcaccccaagagatgagggccagctccactcttcccagtcaccgcctgtgggggagggaggctggacagggcatgaaggcagagcctggtggtctgcccctcccatctaggggtggcgcacagaaagggagactccaggccacagctcacttacaccccagaataaccttgccttgagggtgggatggcttgtctgccccaggcctgttggacatttagcaaaagagaagaaaggggaatacaaacaatcctgagcttcccagaaagctttcacacctccaggatgggagagaatgaactagaagagtgaagcttccagtgcttcctcaggtccacagggaaatctggacaggggagagggtaggaatagccgcctcccccgtgagtaatgacacctcctccagcaggctgttatggggatccgattacataatgctacaaaacagttaacacagtgtctggcatttagtgtatgctcacaaaatactagctattgattctttaccaatcctagtcctaactaaccttaaccctgaccaatccaacaccaaccatccttcagtctaataacccagactaactaacttcaacattaaccctaaaactaaccaatctcacctccaatccagaccccagcctattccagctgactggtcaaccctagcaaaccctggtaacaccaattacctgcccccatgcccactggtctgcccccttcagtgtgggctttgtgggactatacttcaggcctgagatcctgctcagagctctctatcaggctgcgccctctcccctcccctctgcccctggcaggggtgaggggtgtctctgtgcttcccgagcagcgtgcaaaagctaagcgagttcctgtccagtgcagagatccgtgaggagcagtgtgccccccatgagcccacacctcagggcccagccagcaagtaccaggcggtggtgagtgcccggcctccccttgctactcccagcatggtcctctaaggcccaaaacttgggcctgctgtgtcggacttctgccttttttcccaggaagaggggctcccttccctacacagctcccagcccagtgggtcctcacctccaaaccacccccagcccctcagggttgtgaaccgcaagcgtccagcccgggaggattgtcggggcctcaccggcccactgcagagcctggtccccagtgcagatggcgatgctgacaactgctgtgtccaggtgagtcctgctgccccatgcctggccacccagcaccaactcccagagggagctcagcacctggaaagccagaaagctgcatgcttagtcctctgcagaggtcaccctgcctgcctgtacggtccataggagtccagaaaccagggaccaccaagtggggggacccccagccttaggcaagggtcagcatgagaaggccagtctcccactcccctgctctggaagtgatccaggggctggaatcagtgtcttttggctttcatggaggaggggaagccagagactattcactgggaactggctgcctttctgttctctcctgggcggtgggacacgcctaatgaagatcatgggaggctacttcacgtggaccccagatggaatccccacactgtccaacatcaccattcgtatcccccgaggtatggcccagtccacccctccagcatgcccctccccatgtcccactgaataacatagagataaaaagacaaagctgcatttattgagcacctactctctgctcattcttggtgtatgccctgggtatattatagaaggggaaggctacattctagaggcttccgtgtgctgggtgggagtgaagcactaaggacagggtaaaattgccagccttaatgtcaaaccatccattgcagacagtataggtaatgcacaaaaagatcagaagtgggtagccaaggaacgcaagtggaagtgatggggtttctgagaatggacaaaggccctgaggccatgaggcaggaggattttctggcagaggcagccatgagcaaagtatggaggtgggttggaggtgggacccaggatggtgtttcttgggaccacaaggagcctgggctcatactaggagcatgggaaaggagaagcgagtgcttaggaagggtggcggggcaggaaatcagagagggggaaggacctggggagccagaggaggatgttgatttccagaaggaaaggattaaagagggagaggacttgctggggattctaggtaggaagaaagaaaacaggggccccagggttgggtgcatctgtctgtctgtctttctgggtaatggttgttcagactcccccggccccactcacatctgccaccctccctccctgcaggccagctgactatgatcgtggggcaggtgggctgcggcaagtcctcgctccttctagccgcactgggggagatgcagaaggtctcaggggctgtcttctggagcaggtaatacatgtatcctcagggcccagtggaggggaaatctccttttaaccatcctcctcagttgaggatgcacacacatttattggagggcccactctgtgttcagtgaggactcaataaatgctgctaatggatattctcatcatcatcactagtacgtattcacctcttactatgcgcaggttctttgctaagtcctttgcatgcattatttcatttaatttttatgataactaacaaggtccatactgttctcaattctcatttatagaggaaggttaaactatttgtcctaattcacacagctaataagtggcagagctggaattgaaactcagttctgtcagactctgaatcccatggttactcagatgcacggcagtaatttcccagtgtgggaaattgcaacaccaacattggtttccagcttggtcctgagctgcactgacctacacaccataagtgggtgttctgaagatccagatgtaaccaataaatgttggtttctgggcaaagatcactgtcttaattaaagagccagaaccccaggctcagtcaatcacgaatctgttatttatacccacctacttccaagaagcacttgaaactagttgatgaaagattcatgtaaaaatcaaaaccacaatgagataccatctcacacccgttagaatggtgatcgttaaaaagtcaggaaacaacaaatgctggagaggatgtggagaaataggaacgcttttacactgttggtgggagtgtaaattagttcaaccattgtggaagacagtgcggtgattcctcaaggatctagaaccagaaataccatttgacccagcaattccattactgggtatatacccaaaggattataaatcattctactataaagacacatgcagacgtatgtttattgcagcactattcacaatagcaaagacttggaaacaacccaaatgcccatcaatgatagactggataaagaaaatgtggcacatatacaccatggaatactatgcagacataaaaaaggttgagttcgtgtcctttgcagggacatggatgaagctggaaactatcattctcagcaaactcacacaggaacagaaaagcaaataccacatgttctcactcataagtgggagttgaacaatgagaacacatggacacagggaggggaacatcacacactggggcctgtctgggggtggggggcaaggggagggatagcattaggagaaatacttaatgtagatgaagggttgatgggtgcagcaaaccaccatggcatgtgtatacctatgtaacaaacctgcacgttctgcacgtatatcccagaacttgaagtataataaaaaaagatgcatgtaaaataaaaccctttaaaaaggtaagaaaataggaactgagaaatgaagagggtaaaaagatgttcagcaacctgggcagaggacaactacagccatcaacataaaacctggctctgtgccctctggtagccaagggaaaaagggatctctgggctttggagtattcatttaggaataaaagttgcagccaatcagcagaagggcaagctttccctaccaatcatttctaggggaaaattattgaaggtgtcaggtttttcataagcatgagtacagaactgagcagggagaaagactttgggcccaatgtctgaatatcaacatgcacccccgtttcctgcatttccaagatgtccctgaatggtgtatccaaaagatggcaaatttccctcctcagtggggtcgtgggctagcagatgagccccttgggtttcccatcacctcccatcagggactgtgatgtctttgggggcagaggggtctttgcctccattcgccattttatttgggagatttttcaacatagcctgactgggaaggcccaggtattcggtttgagatcatattgccttattccgactgcctctccagcctttggagggaggagcccttttctgctgtccaactgcatgcctgcagcaagaagacaagagtccccagtgcactgtgagctgaagaaagtaaccaatatttattgggtacctcctatgggccatgccctttgctaagtgcattgtcaacatgatctcatcaagcctcctactaagtttaggaggggagtgttgttaccccatttcacagaagcagaaactcaggctcagagaagttgggtgacttactagtcagtgtgtggagcagagactctgcccatgttctttccctcaaacctggtcactgctggggcccccagggcctagtcctaagggttattgtccaagccccatgtagtggtcaggctggatctgggctctcctccaaggcagggcttttccagaaggattgcagggctcagacactggagctgcccctgccttgacctgctcagcatggatgtcaaaacccactctgaacctggtccctttgccctgctttcttctcctcccccaccctcatgccctcatgtggcatcgtgcctgcctcaggagctctccttgtcctatgtagatgaagcaggcatgattggcaggggtctgctctgccctgcctcagtccccacctcttctccaagctgtgccaaccctccgggtctgactgctgcccctctctcttaggaaacctctgccccagcccagggaacacaaggagcctctccaaggcagaggaccctaagcacttcttttttttattattttttattttattttaggttctgagatacatgtgcagagtgtgcaggtttgttacatagctatacatgtgccatggtgctttgctgcacctatcaacctgtcatctttttaagccccacatgtattaggtatttgtcctaatgctctccctcctcttgcctcccaccccccgacaggctcggtatgtgatgttcccctccctgtgtccacgtgttctcattgttcaactcccacttatagtgagcacatgtggtggttggttttctgttcctgcctaagcacttattataggccaggcactgtgcaggcacctcatcatctcagtcagtctgcaccgaactctgtgcagtagatattattatatcctcatttatcagattaggaaactgaggtgaagcaagttgtccaaggccacccagctgttaaatggcagaagtgggatttgcacctaggtgctcaagtgcattggtttgccaccatgtgctcaaagagaaggggcacaagagcctcatgaagaaggcatagctagcctgacagtccaaaggccagcagccgctgtggccatgactcacacacacctgcctcctcccagaactgccacgtgggtcctcacagctctgtccttatcaacacttactctcctttacaggtagcctaggccccagctcccagctctgttcgaggctcgcagaggggcggtagtgaaggggtctcatttctccaggatcctctttgctctctcgcccggtcctggtccagcttccctttcaagcatagtgaagtgcatttgttagcttgcagccaaccctgggaaatcatgagaatttgttcccaagtcaactcattctccagcgtccacagtgacgtattcactcacccagttgagcgcctagtgtatactagaccctgtgacagcaacaggagtgcaaaggtgactaagacgtggcccctgctttttttttttttttttttttttgagacggagtctcgccctgttgcccaggctggagtgcagtggtgcgatctcagctcctcacaagctctgcctcctaggttcaagcgattctcctgcttcagcctcccaagtagctgggactacaggtgtacaccaccatgccggctaattttttgtatttttagtagagacggggtttcactatgttggccagggtaatctcgaactcctgacctcatgatccgcccgcctcagcctcccaaagtgctgggattacaggcatgagccaccacccctggccggccccgcttttaagagaggggagagaagacctgggccttagaagagctcagaggaaccacaattgactctgcagtcaaggagaggaggctcactgcggatgtggtatttgagccttgaaggatgagtgtggtttcatcaagtagaaaaggcagggatgggaaagggaggtggtccaggcaggggtgatggtgtgggcaaagccttgctgatattaaagaacatagttctgtgcacctggaacactggatgcatggggtgcattatgaaagatgggactgaagaagtgaacttggcttagatcccatgtagtaggtctgagaagtaagatttaacccaaaggttgcaaaagaaccatgcttgtgataaaggatgatggattggggaaacagagaaaaagacagacagactgtaggaagggaggtattagcaaataatcataacacagtgtgaggtgtgcattaatattcactcattccaagtattgatcaagaagagaggtaggtactgggttaggaaacagcttgggcaaatgcatggggaaatgagagatgtcaagatgcattctaatggcagcctcttgaagatcttaagttgtttttggttcactcatttcgcaaatgaattcatttagcaaaagcactatggatacagtgcttacctctaggaagtaagttttagcccaaatgctgcagaaggatcatgcttatgacaaaggatgatggactggggagagagaaaaagaaaagacagacagactccaggaaggaaggtcagtctgcagctccttatagtggctaggagaaggagtctaggcagatacgactcaattagcttcatctgctgtttgtctctcaaaatctagacatgtgcactgctctggctggcccacctatcctgggcattgagttaagtgtgggggctgtgtgttgagagtccccctccattactggcaggaactccacacctcagacattgagccccaggtctgcagggagaagacgtgcttgcaaagtgagctaaaagcaaaacagcctctgacctggcaagcattcccaagtctgcacgcctgcagccagaggagagggtgatgccaggctgctgctcagatgcttttcagccatacccaggccaagacctggtgaccaggcagccagaaggagttccaggaggcacaaggcaggaagttgggggattaggaggtgtagaatggagaatgctctggggagatgggtgctttgttggtgcaactattcgtttattcctccagtgaccacgtgagcagtatggctgcacacacaggctctgcagccaagctgcctgggttcacatttggtctctgtgctttggaaaatttcataagctttctctaccagtttcccttattacccatgagattgatgtgaggattaacctagcatgtagtaaatatcctataaatattattattcaatagtgtacttctttgccaggaacaaaattcacctgttcctctttaaatgtcctccagtctgtctcctgggaaagattcttgtgagctccctggggacagggaccatattttgtttgtctcactgtatccgtagtgctttttgctaaacgaattcacttgctaaatgaatgaaccaggaacaacttaagaccttcaagaggctgccattataatgcatcttgacatctctctcctttccacatgcctttgtccgagctgtttcctaacccagtatttcactacccctcttctccatcaatatttggaatgagcaaataccgttagtgcatacctcacatggtattataattatttgctaatgcgtctgtctcctccatgactctgagctccttgagggattattccatgttgtaccccaggtgccccatgcagatgtgtattttgtgcactgttctgtgtaggctacaaaggaaaaggcctagcacctgcccttggggagctcacccacccaggatggacagaggtgtgcagacagagctgcagggtgggcacaaagggtccatctgctgaagtcctgcagatgcagccccgagcttgtccctcacgtcagcagcctggctcctggtctcagagagaactgtgtggttcccaagcattcactttaggaagaatcacttgcccctccctggctctctgcttcaaggaactgtgacaaccttgggatttgcaaactctctctttaatccttaagaggaaaatgttttggtaaaaagtcaagattagcagatacactcgggtgaaattctttccctggaaataaagaatagagccattaatatccacagtagagtgactttaaatgcccccggggggtcagcaggaaccagggccctgaggaaaggatcagcgtggggaagaggctcccacttccctgtgaggagctgcacatgcagtctcactggagctccctgctgcaatgctgttgcctgtggtggttggtgtggatgctgcctgccaagagccctgattccccaggaagagagaaaaaggcttctctcaggacggccctggtcgcatctgcctgtacaattcctggagcctttggggagctgaagtcaggggctcaagtgcccctgggtttcctggaggaggcaggtgtggtgagacagctgacagacaggagaagggatgctctgaggaagtgactgtccagccatgggaaccagatggcccctggctgtagtcctgatgctgccacttgctagctctgtgaccttgagcaggttacttcacctctctgagacagactcactgtctggacaatgagtaaaaccctacctttcctgtctcagagatttggcaatgggacccaatgacatcaattggaaaggatgctgtgggtgaaaggtaacctttcaggacagcgacaagcctgtctgggcaggatgaatgggctgtggagccctgtatatcctagctcactctttgaacctcagtttccacttcttccctttttatttattgccggggtcttaaatgagtgttgggggtatctgattctccctctgcctgtacttttggggccaagcactgagctgaaaagacaattcctcctagttctccaagcctacaacctgccccctaaccagctgtgagctgtaatacattctccagtgtcactgtgaggtttgtgccttcacccccattttatagatcaggaaacagaggctcctccaagtaaaggagcttgcctcagatttcacagccaatgagtggaaaagcctctgggattcaaatgtcagagcccatatttttcctacttctcgcacctgttatcatatgctgcctcttcctttaacctgcagttccctcccttcacctccaccgtctcaatccttcccactctttaaggttcagttcagctatgacttcttctatgaggctctactcattttctcagatttcttcctcctccaaatttcttgtaaaaattatgttttttctctgattctaaaagaatgcacattacattagaaaagatacacaagcatacagaagataaaaaccacctaatatcccatcacccagaagcttccagtttttctttatgcatttgcatatgcatttgtgtttacttttccccaaaagttctccgatactttgtcctacttttcttttgacccttataacttcctgacttcggtacctttctgatttgccctaccagagtgtgagcccctggaaggcagcctctgcaccctgattcaggttgccacacatatgccagctcctagtgggctggagggaaggacatgcggttggggaactggaagactcatgctttcagctgtgtgcttcctccctagagtgcaggcagaggaggaatcgaatcccctcagcactcttgtaaagaccacagcaatgagtgagagatggtgcctgccagacataccattctttacttttcagcttaaaacagatacaaagtttggggaggctcactggaggaggcttggggctacactggaaagagaagaacttggattcacaccccagcttcccctcttcccagctctgtcacatttgcaaactctgagtctcagtatcctcatgtgtaaaatggggatagggtttatagggttgtaaggatgagatgatgagttgtttgcaaacaacttctcacagtgcacagtgaaggtcagcaatgagagccagccccgccctttcttctttccaaatgattaatatatctgttaccagcctccattcattatatagctctgtcatgtgctaagcaccatgggggctgaaaaagatgttcttcctgccttaaaattccactggggatgaacaaattacacgggagctgatcagagaggaaggcagtccattatgagggctaattgagcagtgcagaccatgttgcaaactgagttagggcctggagagcttactgtgtgctggggtcctcaggaatgccacagatgcatcaataaccacctctgctactctggaagtagtcacatcaggaagactccagagataagcttatctgggctgtggccacagagctggaatttgtaagctttaggtttctatgtctcatgttaccagcttgtctataaattgtaaattacagccatctgatggttagggaatatgaagtttggttaagagaatgaaatgagaccacgaagattagagaacaggaaaagaggggactggggactacatacccatcagaatcttcattcagtcctgaccctcagcaggagggggatttcatcaggctcatttccatccttgatttcgtccatcctggttctcctgacaaggggcatttatcagagttatggcatgggaaatcacaggggagtaatgtaccatggcatttaagagtatgaacgttggagtcggagctattttctccgctacttactagctgtgtgactttgggcaagttacttagcctttctctgagcctcactttctttatctgtaaagtgagggcgatcagaataaacctccttcatatggttattttgagctttataaagagacaatactggctgagcacggtggctcactgccagtaatcccagcactttaggaggccaaagctggaggatcgcttgagcccaggagttggagaccagcctgggcaacatagggaatgagactcctgtctctacaaaaaatatacaaaaattagtcaggcatggtggtacgtgcctgtaatcccatctactcaggaggctaaggcaggaggatcgcttgagcccaggaggtggaggttgcagtgagccaagatcacgccattgtactccagcctgggcaacaggagtgaaaccctgtctgagagagagagagagagagaaaatactactatggtgcttataaaagttcaataaattttagctgttgttagtattattaaagtaagatctgtatgaaaataaagcagattttttcccccaaatgttcatgtcagaagtatatatttcattggcaaggggctgcttctggaaggttgagaggtatcctgggggaggggatagagcactggcaaaattggcatcacaattcaagtcacctcactcagtgttttttaagttatcaaaatccacagtatgaaaagcatttgacattacagtccactatatttatgcatttataaacaagagaaaaaatcacgaaaaatacagtaccacgtgcagtacacactgattccatctattctttttttttctttttcctcaaatgcacttgccgcctacttattccagacccaatgattgggtccctatccacagtttggaaaacactataagaaatgattgtgtcctctcactttccctctctgggatttagttttccaactataaaatgctcctgatgcccagccagcctcaccgctgctccgagtcaatgccaggaacgctgatttagcacatgctatttggagggtacccatccaggtgctgtgggagggacagagattgagaagagtgctttctgaccccacagaggccatttggaaaccctgggaatgggtgggagggttggaggtggggattgcttctcccctaagactcagcgtgatggaaaggcaatggggtgggaactaactggtgttggtctgtcccatttgtgtcccagcagccttcctgacagcgagataggagaggaccccaggtacagccttgggactgggtcagaagtgggtctcaacaaagggaaggggtagggtgggggtggaggacttgtgggtgggtaatgctgagtatggattcagggatgtgcagcctacatattttcagagacatggggctaaggcctgcattctcaatgagggcaaaatttggttcttggggacagaaaacacttagacattgcaatgctttgtggctgtccaaagtaccaaacagatgccagtatatctgtggtgctgaaatttcatggtgaatggagtcagaaaatagactagcgattgccagggtctggtgggagagagagggaagggactgccaatgtgtatgggatttgttttggggaagataaaaatgttttggaattagatagtggagatagttgcacaacctggtgaacgtacttttagtttcagaggttttctaaacctctgatttttttttaagtgacaggaaagacagaaaaaagtatatctaaaaaggctctaggggtgatcatggaaaagaaagttaagaaatatgactgtaaggaaaggagatgggtgtccctcaggccaggcagaaaattcagtcttgttgctttatgttcatgtgcaaatctaaaaaatccaagtgatatagattaatgaggctctgagtccctcaaaaccttccctccccttacctctccaaaaaacacttgagataccctagaggtggtatgaagtcaggatgggaaggttggctcagctttgcaaataagtttaagcctctggcctttgctctccaacaccaaagaggcttcactttggtatattttctctgccctttctccctccttgtccccaactgtcagtatgtgatgacaggctcagcctctgtaatggtagtgatcatatttcttgagccaaaaatcagacctcatggcatgtgacaagtttgcatatgtggatgagaacagagtggcagaatatttgacacgggagcagcttgggcagtccagggcacatggcactgcacctgacatccctggcagatcccccacattccgtggttgtcttctgatggggccatatggggctgcagatcatgcctggagccctcgcagctccagggctgcgggttcccagccccagagtgcaggtgctggtgtcagcctgcctggcctggcctggctctgtccagagcactccttgccccagctgtttgtgcagctgtatcagcctcagacctcagcctattcattccaacctgaatgcagaggctgggtctggaggagccacattgcgggcttcatactcctgatctgacaagttttccccccagagcctgcaccaatggcacctctccccattctccctcttaactgggtcctccagggccctcctcacacacccacgtggtcaggcagcagaggcttccccaagatgggcacaccccactctccacacctctctatgcagcatttgtggctacagactgggtccaggggattgtaaaggcatgctcatgttgggttggagggagctcaggatcttcctggaggatatggttcactcccatgagagctcagtatgcctttcctcccctgctgcagcccagagcgggagacagcgaccgacttggatatcaggtactgcgtcctgggaacattgccccccagggtcaactccctccagggtgctctcaggcccaagggagccacatcaccctgctgggcagcccccagaccccagccccagtgttgggggaggccagggagggcccctgtgctccaccaggtggctcgggagctgctgctgtttctgtgcatccatttactcccttcacataagatcatttttatctgggatctctttttcttttttcttcaaaaaccacatcactcaaaatgtggcttccttggctctgcttttaaaaaaaaaaaaaaaagttcttccatttggagaattacctgctgacttcaaagtccagtggcttgagggctacccaaagagggaggaagccagaagttgagtgttcccttggtttggtcacacttttgggctcctccctgactaaggaacaacagactgcagggctggggcaggctgggtgtagggcagggaggggatgaggtcctgctgccccagtcagttgagacccagacctctcaaacctgcctgggggaaggcaaggccaccagaggccacactaagcagatttctaccaactgcacctccccatccccttgcctccatctgagccatcagcttgacaactgcctctgagaacaagcccctgagaatgccttccgcaccccctactcccgccctgctttttccaggaagagaggccccgtggcctatgcttcgcagaaaccatggctgctaaatgccactgtggaggagaacatcatctttgagagtcccttcaacaaacaacggtaaaagcctgtcggagggaggcaggatgtggaggggaggaactgtctctggccagcctgccccagttccgggcccctccatcgatcacccacacccagccatctcactccccaggtgcttacctgcactccagcctctccatatggtgcacctggagaggggccaggtgtgcctgagcattggggcaatccagctcccataggggagagggcaggaatggagggaagggagagagccccgctgccttttctctagctggtgggagggctagctagctctctctgtgagtctccattcgcctggctcctgcactattttccctccaatgataatagttagggctagcatcgactgcgctcttactacataccaggcacagtgccgagctctttgtacacggaatttcctctcatgcttacaacaacctcagtaggtagatattattgttattcccactctacagatgaagaaccaagtttcagaaaggtcccaaggccacccagccagtaagtgaccaagatgggtctcaaatccaaagctgcctaacacctaagtacatgtttgtcaccaacatactctgatgcctccatgaactctggctggcacctgcccaggctaagggctggctggggaagtatgagaggaacaggctgggcaaatatttgaccagccatcatcattactgcctaaaccaaccagcagtggttttccctgcagtgccccaagcacgggttccggctgcagcttttcccactgcacagagatcatgagcgccctttcatcacttactctgcatatttgttcccaaccaattccatccttctagtatttaacctgcccaaacgctgtgtgaagtgctgacctcagctcttttcaagctcacacggtgtttgcttgcacccaagcgggaggcctattaaagccattgctcaccctgggcatagctacccagagactaatgaccctctgcaagtgctcgggccaactctgaccaggctgaccagctgcatcccctgcctctacccacgccaggtacaagatggtcattgaagcctgctctctgcagccagacatcgacatcctgccccatggagaccagacccagattggggaacgggttagtagcagcctctgaggggttttttcaaagccaggacccccaacctaccatgccctgagacactactcaggacaatgggtaactaggaaataggagacattgaaggctgaagagttgcctgcagtaaggtcaaacatgttgttcttgatgatgtcctttgacaggttttcagtcctgcttggagggcaaggtcagcttagtgccctcccaggctggggatcttcttcatttgcaccccaggtatacactgagagcccacacagcactgtgctcagcctggggttgtattgttcctgttcatcctccagatggggtcccctccacaagcttagacgaacaggattctcctgtgactgtcctccttttgtgtgattttaatccctgctgcctctgtctttgtttgtactggtcagatggtccctagcgcctacacaatgaatctttaaagacttggggctcatgctgccctcttctgaatgaattcagtaaacacgtgcaagttccttctctatgcaaggtgagaagcaggcaaagaagtggatagagccaggcctccatcccaaagagctcatagtccagtagggtacaggacagtgtctcctgaatggctgagggcatgatgtgttcctcctctttggtgacagggcatcaacctgtctggtggtcaacgccagcgaatcagtgtggcccgagccctctaccagcacgccaacgttgtcttcttggtgagtgcaagttcccttggggtcctggtctctggctgcctcccaggcctaactgcccacctccacctccccgcaaccccaccatcatccaacaatctccctctccaggagtaaatccctcctgccagagatattgccttatcatcctagtgatagggaaactgaggcaggcaaggatagcacaaatgacccattgcagacttcagatggagctctgcagtagccaatgaggagaggcaagctgtagttataggctgcctgtctgtgggacagcccaacccctcaacacttatgcagcccgactataagaatggctgataacagaatgtgtgctgccacttcccatcttatgcccagtgcagacattgctaattgttcacagcattatttcccatggaacttaactcatcctcagaatccttctcaacacagcactccaggtaaccactagccatcaaacatgagataaaactaggccaggcgcggtggctcacgcctgttattccagcactttgggaggccgaggcaggcggatcacgaggtcgggagatcgagaccatcctggccaacacggtgaaaccccgtctctactaaaaatacaaaaaattagctgggtgcggtggcgggcgcctgtagtcccagctactccggaggctgaggcaggagaatggcgtgaacccgggaggcggagcttgcagcgagccgagatcgcaccactgcactccagcctggggacaaaccgagactttgtctcaaaaaaaaaaaaaaaaaaaagaacgtattcgcaatccttacactacttcatgtcaagttctgttgtgtcaggtgccttgactgacactgaagaattctaagaaccagtccttggcctcaaagatttagaatctgattagggagacagagctcacccagttcaagaggcccagcccggttcaaatccaaactgtgcggcataaactatgagggggccttgtccagggagacaactgtgagggctggagtaatcagggagggcttcctggaggagagcctcaaagggagagtcaattaaacagaaggaaagagggaggccatttgcacagtgagttggaagaaggaagctcaagtctctgattccagctttattccctcccctctccctacaccacacgcacaagcactcctttactaaagacacttcacagtgggaagattcagtctccgttaccgtctgacacacacacagcgttttacaaagcatgggtgcattcgcgatctctcatgagatttaaacaaccctgctagagaaaagtgaagtggacattttatttcagtaaacgtttatgaagcgtctactctgtgccaggcactaaacgtttatgaagcgtctactctgtgccaggcacaggcacaagaagtctcagttcttgggagtgccataatcaggaatggacaaacaatgatcagatctggctttgcgccagtgtcacgggaatagggaggaaggaagggtaggcgtgggggtcaggacaggatgcaggaggaactggtgcttaggtgagcgaaggatgggtgggagttcacaaggcagacaaaaggcagagcagcactccaggcagaggaacagctcaggagaaggcccagacggcaggcttcctgggaacctggaatgcagagtgctgggaaagcacagatgaagcatgagtctagaagggaaagcgagaggttataaagcacctggaacaccagcccacagggtttgactttagagatgatggggagccgttgaaggtccaggagtcaggcagtgaagtgattagatctgtttgagagtgatatctgacaactgccccattttaaatgaggtaaccaaggcccagagaggttgggtgagttgtccaaagccacacagctaactagcttcagtccctagagcagagttgatagaactctaatgggttttatactcattgtcacccctccccaccatgcctttccctaccctctactctcttcctctcccttctgcccaggatgaccccttctcagctctggatatccatctgagtgaccacttaatgcaggccggcatccttgagctgctccgggacgacaagaggacagtggtcttagtgacccacaagctacagtacctgccccatgcagactgggtgagggggaacaagggggtcaggctatagggggcagggctggggaggctgtcaggcatcttggcaggaaccaatccgttgtcttggtagcaactgctgagggccacaaagcataagagaccagcactggatggctttatgcatgctgggcatttcagggagaccctgtacaggccaggggtttggtatcacctagacccacagacactccccatcctggcccgggccccccatggtacactcaaggctggcaccaagaagtctcaggaataatcaagtgctcacttctcaccttctgattcctgcccttttgatgacccatccccgcagtcatggggagtgcccatttggatggaaaagccctcttcccaccctatgaccttcccggggtggatggatgcaccaccccgggaatcatatgggaaatatggaaccaaacaatagcagtagtaatagaaacttcaggctgggcgcaggggctcacacctgtaatcccagcactttgggaggccaggacaagaggatcacttgagcccagaagtttaaggctgctgtgaaccatgatcatgccactgcactccactacagcctgggcgacagagccttgtctctgaaaatttgaaaaaggaaagaaagaaagaaagaaacttcaatattatcagtagagtccaatgttgtgaaacccctcattaactaaatttccatactcttcagtaggtagaaaataattactttttgattcattagaaagcacttaatttttaagatggagatcatgtaattttgaactctaggtcttgcctactcctatataaattctcctctaaacaacagccaaaattgaggccctctttgagcttcaggctggtgccaaatggctctgcttattttccccaaaataaatcttccttccatgtatgatgagaccccctccagtataaagaagacccaaagaaaatcacccaaagaaaaaaggcccaaagataagacccaaagacctaaagatttaaatatatatacagatacagaaggtttgtttctgagtttctgtagtgaccttggcaataccttgtagttcaggacaatcctgaggaacacagaagtgctggcttccttgaggaatcagtgatcaggactctcgagccccttgaaccccagcatagggcgggagggggtgagggcagcaggggtgggtgtctgaattaatgtcaggtctacgtgatggtgtcatcaagtgttccagataaaaagttttattgagccgggcgcggtggctaatgcctgtaatcccagcaccttgggaggccaaggcgggtggattgcttgagcccaggagttcgagaccagcttggggcaacatggtgaaaccctatctctataaaaaaaaaaaaaaaaattagccaggtatggtggcgtgcacctgtggtcccagctactcaggaggctgaggcaggaggatggcttgagccaggaagcagagattgcagtgagctgagatggtgccattgcaccccagcctaggcaacagagtgagaccctgtctcaaaaaaaaaaaaaaaaaaagatttattgattccaaagaggcatggccacacacacttagaccagcaggtgctttgctaagccctgatggaggctgccagacccgccgtcaagaggagctaagggtagtgtacaatgagcccacttagtgtatgacggccgctgccgtgggtggagtccttgtgagtaaccagccagcttgagcaggatgcactaatttgctctgcaaacccagccattgagaaatacgcctcagatgtaccgaactctaggtcctaggagtatgttggttggggtaggttatcaataccagcccacttgcagtggatgagctggtggccatttgtagtgaggaaagggatgtgtcaacctccatcttagactccacaattgagggatgtgaccaccattcctccccagccagcccccaaaccacgtttgttgctgcctttccagatcattgccatgaaggatggcaccatccagagggagggtaccctcaaggacttccagaggtctgaatgccagctctttgagcactggaagaccctcatgaaccgacaggaccaagagctggagaaggtgggtatatccagggatggccaagcagccacccctggatgcaaaggttctgctagaacctgaactcataaaggtcttcctgtccttagtgccccaggaagccccctaaagggcagatgtgggagctgggcatgaactggctcctaccagaggagagacagtacctgtgccaggtgcccagggcagaatcaggtgggcaccttcgccttatcctgaggtagtcagatactatttagttgcaaagtttcagaaaatcaactcaaactggcaaagaaaactaagcaaagaaaacaagagggaattaaggatttattgacccatgaaaccaaaaagtccaggtgtgtcatagctttaagtgtgctggatccaggtagtcagtgtaatcagaaatctgtttctcccatctcttgactctgctcccctcaaattggctcagctcccctcaaattggctccattctcatggtatcagtgagggccaccagcagtcttaggtttacattctcccagctcaacaactctgccagaaaaaaagtgcctctttccccatagttcagcaaaagtcccagggctgagtctcactggtccagtttggtcatgtgcccacccctgaacaaatcactgtggccagcggtgtggaatgtgaggattggcctgtcctgggtcacgtgccactttgggagccagatccacctgaatcacagagactaaaaacaggggaagagtggttccccacagggatatgggggtgctattatctgatgaaggggaaggactaaatcctggcaagatgaatgtgtgtctgtctgcccctccctcaggcagggacaaagtagaaatctgacattggtcatcaccagagtagttaccccttaacttccccttcccccaccaaccatatatcctgaagacattgcccaggccacatctgtcttttaggagactgtcacagagagaaaagccacagagccaccccagggcctatctcgtgccatgtcctcgagggatggccttctgcaggatgaggaagaggaggaaggtacaggcaatgggactgggagtgaaattatggcctgaggtctgatcagccacagagaggctaaggtttggggttctgggtgtggtgcagtagtgtgcctttgattaaatggcttccctctgtgtgcccccgttgtcccctcagtaagtggggataaaatgccctgattcaccctcagagggatggaaatgtgtagccacagagtgggttcttgcggcctgcagaggaggcagctgagagcgaggaggatgacaacctgtcgtccatgctgcaccagcgtgctgagatcccatggcgagcctgcgccaagtacctgtcctccgccggcatcctgctcctgtcgttgctggtcttctcacagctgctcaagcacatggtcctggtggccatcgactactggctggccaagtggaccgacagcgccctgaccctgacccctgcagccaggaactgctccctcagccaggtgtgactggcggcccatggcagaggttgggagtggggatgggggaagggctgagcccatgggcaccctggaactccaaatcactctctgcctgtgaaggagtgcaccctcgaccagactgtctatgccatggtgttcacggtgctctgcagcctgggcattgtgctgtgcctcgtcacgtctgtcactgtggagtggacagggctgaaggtggccaagagactgcaccgcagcctgctaaaccggatcatcctagcccccatgaggtacccgtctcccctggccaggctgggactgtgagcaagtcactgttctctgagccttagtcttcccatctataaaatggggatatacaacctgtcacaagcttgtgggggtgactcaaggagacagtgtgtgtaaaagtgccctccttgtgcaagaagcagggagaaactggcatttactcagccagatactgtgataggcattgtgtgtggttagctcatttaattgttaccatggccctttaaagtgagcgtctgcacatccaagtaaagattgttttctcctccctaagtgggtgtaatttgcccatccccacccatgagttcagctccctgccctcccctcactctctctccctcagccagcctcaggttttgacactgggggaacaggtagctgttctattaataatttcctgtaatgggatggataaaaatctcaaaggccacttgatgtcaaagaggtttaaagttgtccctgcccaattggttggccaacttggcttaaaaacacaacaggcaaacagattttctggccccttgtcgaggctagacctcacaatctaactgcactttttactttccagcctcatgagttttctgtggcccacagatatggcctccaagtttatttacttttactctctatttgccccagctctgtagttctgaaactccctggttggggttgggctgactctgggtcagccagccggcaggctgtccccagggccctgttcctcttggcaggttgtccctctggagaggactctgtgtcccaggaggacagctgctgagtcaggccgagccggcagctgagaaaggcggcagtcgtcagatgggcttgagaaactgaaaggctaacgaaaggccagcgcccctttgggcagctgcaggaattcacggggatacaggccagatgtctacaaattggcagaggatgccagacccatgaatgactccagagacacttacatgaaataattaactatctcattcagtaaacaggaagtaaatcaatggacaaatgagtaactcttcctctggctgcctcttaggttttttgagaccacgccccttgggagcatcctgaacagattttcatctgactgtaacaccatcgaccaggtacagaggaccgtgccacactatccccccttccagagacacctcggacccctgggggcttctcctgtctgaggctgggttccccagatcaggtgatcacagccctctgggaagaagccagtgtccccgatccgattataatgctgcttcagggctggggcctccctcgtgggagcctcacagtaaggctgagggaaaccagatccctttagcttccacctgagatcccactggctttctctagtaaagttccagcatattctgaaccaaggtggctgattgtatggagaatattcattttgattcagcctgtgttctttatttaccattgtaccagatggtgtgaaaacaaaatcttgattcctacctcagggagtttaccttgtagctggagagatgagatacgtgcctataataaagggagagcaaggccgggctcagtggctcactcctgtaaccccagcactttgggaggcggaggcaggcggatcacttgaggccaggtgttcaagaccagcctgatggccaacatgatgaaaccccttctctattaaaaatacaaaaattagccaggtgtggtggcaggtgcctgtaatcccaactacttgggaagctgaggcaggagaatcatttgaacccaaggggcagaggctgccgtgaaccgagattacgctgctgcactcaagtctgggcaacagtgagactcagtctcaaaaaaataaaggatcaaaaaataaagtgagagcaaaacatggcggccagtagcactctaaacacagtcaataccaaaattcacctcactctctccccctcgtctccctcagcacatcccatccacgctggagtgcctgagccgctccaccctgctctgtgtctcagccctggccgtcatctcctatgtcacacctgtgttcctcgtggccctcttgcccctggccatcgtgtgctacttcatccagaagtacttccgggtggcgtccaggtgatggcctcaggggtgaggggtgggaggtgctttgcaatgtgcagtttggtgtacttgctagactcatcgttatgagagtaatagggtcgtgttccctccaaaaaataaaaacaaaaaacagaaatgaaggaaatagaaatatccacatcttattccaccgccctaatataatagtctgccaacacacgcacacactgaggttgacatctgaattatttccttgggcgatatggtcaggactggaattgctaggtcatgataaatgcacattttatgcccttcattcattttgccaacatgcttcccaggagggttgcatcattctagtggtcaggctgattgctgatgcatgaaatcggcgggcacctgattcaagcagtgttatgataacacctcccagcccacgtgagtccagagtgtagctgtaagccttgacttgagggagcctctcacagccattctcatggatcacatttgccctcatgagctttggatccatgcacgcctctttcctcctcaaaattttctaagaatgttctctagggagttctttctgggagtgattctcccagattcatagaaactcatagattcaaaaaattgtaggaaaaaatttaaagaacgtctaggccagtgtttctcaaactgccaattacagcccatcagtgggtcatgaaatcaatatcatggatcacaaccagcatttttttaaaaatgaaaaaaacatcagactgtattcatagagtaaagcaagctttgcttcatgaaacctttgtgttggtcatggaggtgtgtgagtactgatttgtgagataaaatatatttctgactgcaggttgtggtcagaaaggttaagtacctttcccaagtgcacatagttggctagaaactagagttgagatacttattagcaataataaaatttagatgcattttggacacaattacctgccccaaaggatcaacatttgtataaatggctttttgcttggatgatccagaatggcccgacacccacacgaacaacatagctttttgacactcaaaaaattcaaagtgctgcacaagctgttctacaaagttcatttcttctgccagagaaacagcccagtctctgtggcacccagtctgaccctggagatggtttatcagggaaatcaacttcctgcatcccaaactggcctccctggcactgatgtgcttgtcgaggtgcagctttggggagcaggaggcaattctgttgccatggaaacctctggccttaccccgagacgaaacctatcatttcagcacatcactggccagggtctaaagagctccttgatggggtaagcggaagacggggttgaacgctttgagtttggtcttctgttcctttggccagctgtctcaaggttcagattgttcacctgtaaaatggaactagcactgcctgcccagccttagctcagctccaggctgtgcagcagaagtacagggacagatggcgacctggggttgacaatgcccaggacagcagtaattgtgccccacatcaggctgtgtctaagcattgtacataaacgatctcattcagtgctcacaaaagctcaatgggctggtggcattgtcttcccccttcacggggtaagaagctgaggcctagagaggtaaggccattcacccacacagcggtagcaggtggagctaggcttcaggcccaggccgagccctgagcctgccctcttaactgttccactctgttccccgccacagggacctgcagcagctggatgacaccacccagcttccacttctctcacactttgccgaaaccgtagaaggactcaccaccatccgggccttcaggtacgagtccacattcccccaaggtaggagtggaacaggggtggggccagggggcacaggccatgagatttgattctcaggactccacttgggaaggccaaggacacgttctctctcaagctgcctcaggtcccaaggcccaagggatatccaccagcagggacaggccaggtgggctcccactgaatgttctagagaggaaaattccagctctgtagacaagcccaggacctctgtgaggcagagcatgaaaagagacaaagctgggacaagtcttcatgtatcaacgctagaaagggccttaggtgcgggccaccctaagcccttcttttattaaggagcccctgtgtgccaaacactatgctgagtactgtacaggccaatcccactcattctgcactgcaaccctcggtgctgagaatggtcatttccattgcacagacaaggaaactgaggcacagagacgttctataacctctctgtgtaaggtgccacaaagcccagacttgaacctatttgttcatgcaacaaacatttactaagccccgactatgtgctaagccccatgccaggcactaaaaagatgagtcaaataagccgctgccctgcaggcgtttacagcccagactttgagcaggccaggataaatccacgtgacaagtattctgaaaaaagcggattcaagggctgtgggagcatagaagagagacagtccgggaaggtttttgtaccagaggtgtcatcagaactaggactcaaaggaggggcaggagttcaccaggctgaggaattcctgaaaacttcagtgcccctgccatcgtctcactaccctgagtggtgatgttggggtggacaggagcatctgaggttgcctggggaatgagggaagctgttgtttcccactccccaagagtctgtctgatctccagaggcatctctcttccagtcaggcaggccagagacccctgacacacaaagttgggctcttttctcatcttcatccagagagtgataataggttatttttagggtggcacagctgcacgaagtatgacagtaaccatgagacaccaagcactgtgtccaggagtaaccatagggcacaaggaccagccaagggccagagaggcttacatctcctccccccaacccctgaagtccagcttcagccctggagaggtatccaggcccctctgcccaccctggagcacctagggccagtggaaatccacctcttagggatcttgtctaagtaaagaagagcagagcaaagctctgccctggccttggcgctgctccctggacatcccttgcccctggacaagcctatgctgtgtcttccacaaagaagcttgctggggactggattatgactctagagtctcctcccagcctcctcttctcaagcctgaacttctcccgttccttcaacttccaggtccctcgacattactgagcctagcctttgctctaagttttggtgatttccctctctcaattggtgtctcagagggccctggggtagagagatggtgactcttctagagtgggccacagccccttgtgtgcagatcccagcttcctgtaaacagcctcagatcaggccaaacctgtggtcagccagagccactgctacccagtgaggtcttccacaccctactgacacggtgaatgatttttaaatttgaatgaaaggctttttaatcaaccccatacacatttaatgcattggctttaatccagcagcctgttgagagctattagcacttattgattgcccacttactgtatgccaggcaccgtgctaagtgttgtatgtgcattattacatttaatcctcacaaggaccacataacataggtacgaatcgccacattctccagatgcagaagcgagacccagagaggctgggtaatcaatccaaggtcacacagactgcgggggctggcgctgagcttggaacccaggtttgcctgaccttctgggctttcctaagagatcttattttttcccaaaagagtttcaagagtgcccagcactgggctcagtggcgggctcggaggttgttttcgttcatgtaggaactatcacttccccatttttttcataagaaaactgagtctcagtcctgatacacagccaggaagttgtgatgttcaggctccaacctgggtttacatggctccgaggctggggctcttttctagtcctcagacacactgtcgcacgcctgtggcagaagctcccatctcacacttgccgaccctcaactcacacagtcctgagacccacatacgctgagcgcctcacactcctataacacgcacatgccctgatgcacacacattttcaacacgcacttactctacccttcaggcatggtttcacactcactgcagacacgtcaccctcccacacgtctccaccctgggggtgtgcagtagcatgctctctcccacctcagaacctcccttcagtcccctcagacacatgccctctctccacgcagagacaatcaaagctgaactaacaccttccagggtgaaaagcaaatgcccagtaaggtacgtcttgggtgcctccgtgtcccctgagtttggtcctatcaaaccagcgatgatgaggcagcttttctttcgttccttcctccatcatcaaacaagtgctcctgcatctcctctgggccgggcctacgtcagcaaggtctgagggaagcggccaaggagagtgatgacggcagcccaggttgatcagagaaaggaggcaggtccatgcgcagtaactcagggaaaacatgatgaggacctaaggatgagaaagaagcctccagagttccctgtgcagagagattccatcaatttcagagggtcaggggagtgccatgcattcatccaacaaatatttattgatagtgccaggtgctggggtatattggtgaataaaacatcttcatggaatttgcagtctattgagggagatgattataaatagctagagaaatgcatgtacagcagatactgtggagcaaacaggttgcagacaataataggggaaacctactttatagtaaggtagtagccaggaagagcctctctgaggaggcagcatttaaggcaagccctgaaggttgagttgagccagccttatgaagagcaagggcaaaagccttccaggaaaagggaatagtgtgtgcaaaggccctggggtagggaagactttagtattgtcacagagcttttaaaaagctgagtggctgcagcatagtgtgtggggtgtttgtggcaggaattaggttggcaggagggggttcttcatcctataagcagtggaaggtcattaatattcttttttatttgtttttttttttttttttttttttttttttgaggcagagtctcactttgtcacccaggctggagtgcagtgaggtgatcttggctcactgcaacctccacctcccgggttcaagcaattatcctggcttcctcagcctcccaagtagctgggattacaggtgtgcaccaccatgcccagctactaatttttgtattattagtagagacagaattccaccatgttggccaggctggtcttgaactcttgacctcaggtgatccgcccgcctcagcctcccaaagtgctgggattacaggggtgagtcaccgcatccggccggagatcattaatattctaaacagtgggggagaggacacagtttgcgatttagatagattaagccagccactgtgtggagcatggactgtagggagacagcaggtagacgtattcaggaagctgatgcagtagtccaggtgagagtttgtggtgggcaggaagcaggatagagggggagggaggcaaggactcttttagagagagacataagaggacttgccaaggggctgaatgtgaatccaggtgattcctgggtgagaaactgggtaaagggaggtgccccttattataatgggaaagacctagagaaaatggatcttggggtgaaaacaagagtttggaggaggtggggattctggacaggtttgaataagcagaaaggagtggggtggacattccagagagggatagcttacatgaagtggccacggtggcatgtctggggactggaggggccctggagcctccctctgcaggtagggagactcctaggagctatgtggaccaacactgttcccttaggagcttctcatcctccctccaggtatgaggcccggttccagcagaagcttctcgaatacacagactccaacaacattgcttccctcttcctcacagctgccaacagatggctggaagtccgaatggcaagtgctattcccctctaccctggcctctgataggagggtggggccagagcaagagcacacaggtacctggggatgaaagagaggataggataccagatcgtgtggacaccaagccttcctgcttcccccagccctggtggtcctcctagtgtctagcctgtgctccttttccccatatcactgcctggaggcttgtgtatctgaggtgtgtgccagtggcaagaacagttgtggtgaatgtgtatctgcagtgggtcatatgacacccacattgtgtgtgtttgtgggccagctgaggcgtgcatgttaaagggtgtgcaggggctagggggtaggggagcatgagcttgtgggacatgttggctcctggggctccagccttcgcagcccttgtgtgtgtctggtgacgtgtgcatgagttgcagggctggagtggaggcctggctgagctgctctctgccccgaaaaggagtgaggtagaacaggggcctgtggctctaacccctgagcgcccaggtcagctcctctccctccccaggagtacatcggtgcatgtgtggtgctcatcgcagcggtgacctccatctccaactccctgcacagggagctctctgctggcctggtgggcctgggccttacctacgccctaatggtgagcggcagtgggctagggcagaggaggggtcagacaccagcactcccggagcaccttcgtcactggagacatgagacactcccaggccttaccccaatttcatttgcatctgatgccagagggacagtgcgggcaggaaggctgaccagcaggccccagggcccaggccccagacaggtggaggttggggagccacatgactgaccctccctgtgcctccagggagggctgctctgagcaggcagtggatggcagcaaaaggaatctggggccctggcccctctccagccttaagaagagccattctggtggctgaggacagaactaagcgaccatggagtgtgcgccactggcttgctccccacaggtctccaactacctcaactggatggtgaggaacctggcagacatggagctccagctgggggctgtgaagcgcatccatgggctcctgaaaaccgaggcagagagctacgaggggctcctgggtgagaggctcagggagaggggtggggaagagtccaaggaggagtgtgtctgggttgggggccacaagggagcctggggatggggtggcactttcggatactagctgtggcccatgcctggtggctgagcccagcccggcccccagcaccatcgctgatcccaaagaactggccagaccaagggaagatccagatccagaacctgagcgtgcgctacgacagctccctgaagccggtgctgaagcacgtcaatgccctcatcgcccctggacagaaggtcagagcacgggcccaacccaatgctgcaggacaggcgtgagcaggggatggggcatgcacggagctggatggcttcgcagtcacctcgtggccctccagggccgaggcctctcactattcagacatcgcagtctcctgccctgggcctgtgggggcccatctttcctctccttctattgccttcccccagtgctgccctcaggccttgtcttctcactcatccaccaaggagaccgacactctggactcccccagctcacacgggctttgtcagggcctccctctctgcgaatggtcaggggctttccctagggcactgccccgagcttcagggcagggacctgggggcagacagcgaggccacccttgtattgagggtgagcccctgcctatggccctggcccagctctcctctcgtttcccactctgtctctttgtctctgtctcactttgctgtggctgtccatgtcattctctgaccttgggatgtacctctgtccctgcctctctcatccttctatgtcactatctgtctccgtattgtaatttctgttggtacccaagtgccaggaagcaacgggatcagaggtggctccattgtagggcggggcacacagacacatccatgcataccactctcagctgcccctgtgtcctcctgccacacccatgcccatagagacacaccactgccccccagctctccttcagccaagtacccggcacacccagacccacaccaaggcccaggcaaatggacatccatgcctgcacttgcgtgccggtccctgtgtaagccctctctggacccactgcaggaaacaagcccaaacctgtggtgtccaaagagaaactagtcagaaaaccaggccaaaaagataccctgtgacctcccacacctgcacacacacccagagctagcatagaggctattcccagcagccccagagtcccagtggcggtgcctgcttctctctttccagatcgggatctgcggccgcaccggcagtgggaagtcctccttctctcttgccttcttccgcatggtggacacgttcgaaggtgagttgtaaggcgggcaccccacgtgtacccacagccaccagatgaggcctcagccctggcacgtggtcagacatgacaggaggcccagcagtcaccgccttcccctgcaccctcactgggacccatgcagggcacatcatcattgatggcattgacatcgccaaactgccgctgcacaccctgcgctcacgcctctccatcatcctgcaggaccccgtcctcttcagcggcaccatccggtgagccccaccacccctcaggcccacccagccccaggccggctcagttccatcagatctggagcacaaagaggagggggttgggggagaccaggatcccagaggtgtttcctgctcatgcccttctccatcccatcaggcccaggcagcctctggaaggggatcccccacccatgggtctaagatgctgtcccccacccactgccaccacctcggtgcttctcccagccagacctccaactcagtctgctctcgctcactgccctctttgccgcctggggatgcaggcaggaccctgctccctccctactggggctttctgtgccacttccagatttaacctggaccctgagaggaagtgctcagatagcacactgtgggaggccctggaaatcgcccagctgaagctggtggtgaaggcactgccaggaggcctcggtaactactcctggctatgcagctgggttggttgggcactcaaggaccctgtaaggatggcagacagaagcccgtgtctcaggtttgccccaagtttggagtctgaagcctggcaggaccatttagtcctacttctcactatacgggggcccagagaggtcaggtgtcttgccccaggtcacacaactggtcagttcagggtctggctcctcctgcagggtacagcgggtacagtcagggatccttgtgagacagagattgcgagtcccccatgccaagggggcatcttcagccctgccctgccccatccacctgcatgcccagttctgccttaggggaggagaagatggactgggcaatcatagacacgggtcactcatcaaggccaccggtgattggcaaagccttggtatatttgctgcagctcctggagcattgggggtggccaagccttggtttcaatgaatcaccctaccaaggccctacatacacactcagtgcacccctcagtgcacacgccccctcccagaactgcccagggccacagcagcacacacctccaggggtgcccttctcgttgcagtccttgcagacggcctccacattgttgtgtcaggtgcaccagccctgcacacgcctgtgctcttggacacacacccacctatttgcccccatgcacacattttccaacagccccccaagccatcccatctgctccactcacagcacaagattaactcagtcctacttcatctccccgggctgttttcagatgccatcatcacagaaggcggggagaatttcagccagggacagaggcagctgttctgcctggcccgggccttcgtgaggaagaccagcatcttcatcatggacgaggccacg

SEQ ID NO: 15336 - DNA, 83931 bp, Homo sapiens
gaggcgcggcaggcgcgcggagccagcggagccagctgagcccgagcccagcccgcgcccgcgccgccatgcccctggccttctgcggcagcgagaaccactcggccgcctaccgggtggaccagggggtcctcaacaacggctgctttgtggacgcgctcaacgtggtgccgcacgtcttcctactcttcatcaccttccccatcctcttcattggtgagtgcgcgcagcgagccgcggaggaggggacgggagagcagggagggaggaggaggcgctgcgcgccgcaccgctcggcgtccccttccggcccgcgaccgccgtccgcctcgttcccggggtcccctgccctgtgtcctgcccgccggtccccgcactcgcacaccagctcatcccttcactcccccggtgcccccgatcccgcgccaaacacagcggacgtttgtgacccatgggatcaccaagttttgcttctgcagggccaagagctgggatggggaaaagggaaagaggaggtctcagcacgcagtgggaaactggagaggggtcgggcctcaccctccgtggcgcagcttagggagccgggtcacccctcccgcaaggcagcctccctgtcagccgcagctgggcctagggaagagggaagcctgtgctttggagtctgggatggaggcccagctaacccctatgctttcaccgggctgagccgcgcagtggtccgtgatctctgacagtcccaggcccgcgccctgggcgaggagaggcgagagctagggacttggattcccttcccccgccaccccacccgggcatgtgtctccagagcgcaacttctcaggctctgcgcaaagtagctccgactcgccgacgcagcgaccccggcgcccttgcttgcaaagttgggcgccacggccgggacaatcgtgcgtgcctctccactgaggtcccccccatctctctccaagaccttgactcttccagaccagtcaagtctatcaactcatagggtgtcccctgcatccccaaaacgtgttcattcactttaagaaaacaagcaaatcttaaaattcatatacagctttggggaagaaaggaaagattgtcacaaaattagatttacaagaggttgctgcagaagcagagttgctagttattaacaaagacagttagatagaaatagaaataaaacatacaaaatatgtgctcatatgtgcatcaaaaatcaaaaaagaacagcatttacacttctgttctcagccaaacggtttattaacctgatgacttgtcacacaagaagttagtatgtataatggggtaccttggcagggcacagtggcttacatctgtaatctcagcattttggtgggctgtgacaggaagactgcttgagtccaggagttcgagaccagcctgggcaacatagtgagaccccccccgccctttctacaaaaaattaaaaattagctgagcatggtgatgtgcgcctgtagtcccagctactcaggaggctgaggcgggaggatcacttgagcctaggagatcaaggctgtagtgagccgtgatcgtggcactgcactccagcagaggcaacagagcaagaccctgtctcagtaaaaaggtgtggtgggggaggtaccagcataggaccaggctgaatgagttggacgtttagtttgtgtgtaccagccttggggatcctcatgtgtaggtgtcaccctcaccatggacccaatgcccaagcacctttctggggttcatgcaccctcttcctcctccaagtgggcaggcatcctgcctctgactgtctctccctgcaggatggggaagtcagagctccaaggtgcacatccaccacagcacatggcttcatttccctgggcacaacctgcggtggatcctgaccttcatgctgctcttcgtcctggtgtgtgagattgcagagggcatcctgtctgatgggtgagtgactgtctgaggactcaggaaagtgaatctgctccagggtacttcctgaaaggcccaaggagatcctagctcacctatattccacaagcccatgtcttttgttactacatccagcagctcagtgtcttctatgtgccaacctctctgagctgggcactggacgcaagtgagtcccaggccctgccatcagtccaggagagcagagggaacacggacctgcatgccaagtcccagtgaaataatgctagagcctattagaatgccacaactccagtgaaaaatgtctggcctcttctacaacctgccggagttaccttcttggaaaaaaaaaaaaatctaaccatgccacccactcttgcataagacctttccttggttctcagctgttttgaagatgtggtctcagatcctcagcccaccattcaaggtcttcacagtcagccccacctatctctggcctcattccccatgcccaccttccgtttgggcctcacagcacactcctcacacctctgctacagcacagatcacactgtatgttaaagtttatgtctatttgcaaaactgtcttcagagtcagaaaggcctaagagttagaatctgagtcttgttcatctttgtgttcacagtgcaaggcatgtgataaacataaacattattcagtccataaacatttattgggtccttaggagaatgaatgaaaccatgttacaaataagtactctgggaggtgagaggaaggcagaattgggcaagctccatggttgagagggctttggagcggagtctggaagggtgactaggcttcagacacacagaggaggaaggagagagagaactggtggtgcctgagggaagggaaaaggcaccaaagagaaaagcaggtagggctagggagcagcgcaggggctggagcattaaacacaggctggggagcgatggaggctgaggctgggaacccaggttggggcatctcaggaggactgtgaatcccagcctgcatgtttgggtcggatttggtcagcagtttggaacagaagagagatgtcatcagcataacacttttaggtgggaacctgaggtgttcagcgcaggctggaggcagggagaatctagaggtataatagaagcaggacttagcattgactgcagtagtctaggtgagcaataactgcagacagaaatggtgtgtcagcagtcagggacagaagaggagcgggagcagccatctcactaaggaagaatccagtaaccagcaaggatgagagactgccaggagagggagtggtggaggagagggatatttggcttgagtatctgaggtccagcgccccctgagctggaatcagattatacccagactgcactcctgcagtgctgcctggctcctgtagttggatggcaggggataggctccctcatcctccctcccgttccccaccttcccttccccaatgtccctgcatcctggcttcagcagtgatctctaaaatacctgcttgacttggaggcagcagctctgcctgcttattaaagtccctagaccagcaagaagaccagaaggcatactgctacacaagcacgtgacaagtccgcctccacccccacccctacaccccttccaaagtagcacaaatgccacagtgagccctcagatgggaaatactcaccagatggtgacagagaaagacacctccgcccttggagaaggaagacctgggtcttcagtgagcactgctgctgtgtaccagctatgggactttgcacaagtcattcaggctttctgggcctcataagcatttataaacatacgataaaacattttagttgccaacttaaaaatgtgtgagaaagtataaggtgtttcaaaattatttcaaggagtaaagaggcaagagttttgaagatccctgggcagggtgttggctgttcccagtgtggccattcatgactgctctctggccttatgaaacaagcatcatagtccctggcttgcctgcttcatggggctgtggagggtgaaattcgagcatggacagggtgcagagcccggagtggcagagcactgggtagactgtgtattcccagaatgtgggaaactggaatgaatcggtccagggatgccctcctgctggctgtcagcagcccctcctgtgtgtggctgtactgcttcagctcagtgcaaagggccatctcctccccagggcacagatcagctcaagctgagtaattgtcatctggtctttgtgagctcctacccccaggcctgagtgaggggcaggaaaagagcagacaggagaagtcacagacccttgtgatacctccagtctaatccagcctgggttttcagagctgtctggaaatttagggggcaggtgggagggggctgattaaggcagccctgatttgatttagagtgagcctcatttagtgactaattaagccatcttaaacctgtagggcttcccctcttcctttgggtattatttctttctgtgatgttctgaattcagaacaatcaaaacagtataagttagtgaagaagatattttttaataactacaatattttcccagaccaccatacactggataaagcctgtatataaaactttacctaatttcttaactaattgaatgtgtattatttaacaaagcagctaaaaactattctatgaagccatgtcatgaaatatttagttcaattatggttaatcctcatcttatttcgtcttataaaattttaacatttctacctcctattgcaaaaaaaagcatttatatcagcatataataaaacatgtctagatgtcagcttaaaaatgtgtgagagagtagagggtgtttcaaaattatttcaaggagtaaagaggcaagagttttgaagatccccaggaagggtgttggctgtgcccagtgttgccattcatgactgctctctggccttgtctgtcttgtaccttctatattagtttgaagaccttttttggagaatattcactaaagaatatcaatatctaccatttcattaaaaaagaaatgtggagtttgccttttcaagttggtttgatgcttattgatgttttcagggacccagcctcttcccatctttccataccatcctgtgtgtgtgtgtcagcctatcttccccatggtcacaaggtggctgcctagctccgggtattgcttagcatgagcagagagggcatgctgccgacatgcctctcctttatgacagagatcattctttctttgacatctcactggccagaatacgtggaccaacactggcaaaggagtatggaattgcatggctgcttaaaccaatcaccatccattccctggggctgggtatattgctgctggagcaaacctgtggtcctcctggcacagaataaggggaagatactctttggtggacagcccacattgcctctacacttgcacctcagtcccaccagacccactgaggtcacaggatagctctcctcatgtccttcctccttctctgttgaactcttatgtatccttcaaagtccagcctggtgccacctcctctgggaagctgtccttggttgcccaccccctcctttgtgctctctcagtctctgtccatcggcagtatcacttccctagcctgctgactccaacagttagctctgagcatggcagccccctccataccatcagcttctcaagggcagggacccttggcacactggatagaagtagcctggtgggcaacagcagcactgaggcagcaagctgtagcaggccatctgggaatggagtgggtaccacagggctggagcagaaagggcaggctgggcagatctgataaagtggctggaggccacatagcctgggcctttcgttccaggctgagcagagtgggttttgctgtctgcaggagggagctgtggaagggcatgatcacgaccaactaaggtgaccctcctcaccaggcccagggaagactgaggcctggaaggaggctctggctgcctctgggtcttacccccaggccacagtccacccacttagaggcctctgtgagttaaggtggagagactatgagctggtattgactgctccattccccatcccgagagaggagacaaaatcagtgaccttggaaatgcctcttcgtgcctcagtttcctcaccccataaaatgggagactaagagtacccactcgatggggtttaatgaagattaaatgggttaacatatatcgcatgcttagaacagtgcctggcacagagtaaatgctccataaatactgactctcatcagtttgttatcacagcctctggggagggcgccagtgctgacttatgctgttcgtgttaaatggggctgtcactgggtgagttgtggcatacaggcccctgcactgttcaagagaccccagcaacccttgtgcttagggctcagcacatagtaaggcctccagatcatatacccagctctactccatgtactggcagctctgcccagcccataccccaaatacgcccattaactaaagggccctgcagcctataaagtgatgctataaaggttcagtgttcagcctttgaaattcaaggcctgggctgctctattgcagtacttagcatgtccccatcctgtctgtttctctctcccatctcagggtgaccgaatcccaccatctgcacctgtacatgccagccgggatggcgttcatggctgctgtcacctccgtggtctactatcacaacatcgagacttccaacttccccaagctgctaattggtaggtgaggtgtaggagggaggggcagtaccttcattcatttcttcagataatgtttactgaggactcattatgtgccagctattgctctaaacagtagagatttggaatagaaaaagaaaaaaatccctgccttcatggagcttacagtctggtgaaggaggatagacaggcaaagacagtgaataaacaagcaaacaaataggtggtggggatgctatgaagaaaatcaagctgagtaaggggtaggggcaatgacaatgttgctatctacacaggatggtcagggaagggctgtggtaactgtgggcatgcagatatttgggggaaggtattccctgcaaggggagtgacaagtgcaaagtcctctgatagggatagatttggcaaagatgtcactgtgggcaaagccaaatgagcaaggggaagagtgggaggtgagggcaggcgtcaggagaggagcgagcaagagtcccaggctctgggcctgagagcctgggtgaactgtggcatcaataactgatgtgacagaggagggggaggtgggctgtggtggggataaagttttctactgggggcatatcgagtttgagatgtcacagagacagccaactcaagtgtcaagttgggctttcatggggaggtcaggacaggagctacactttcaggaggtgggccttgtagatgacatctaaagcttgagcctggggctggctgccgtggctcacacctgtaaccccagcactttgggaggccgaggtgggcggatcacccgaggtcaggagtttgagaccagcctgaccaacatggagaaacccccacctctactaaaaatagaaaaattagctgggcatggtggcacgcatcggtggtcccaggtactcaggaggctgaggcagtcaaatctcttgaacccaggaggtggagattgtagtgagctgagatcgcgccactgcagtccagcctgggtgacagagcaagactccatctagaaggaaggaaggaaggaaggaaggagggagggagggaagggagggagggaggagggagggagaagaaagcttgagcctggatgaggtcacctggggagagaagagaaaggctctgggaccagagcttgaggtttgctaacatttagagagactcgggaaggactgcccacttagagcttctgagatgttaaatactgcaggactggggtcccaggcagaagcaacaggatgatggttggtgtttactgagcatgtgccatggggcaggctccatgccatgttccttacattcattgtcccacaggctaattcccccagcctccttattggtattgttaatatccccattttccagtgtggaccctgaaactgagaggttaaaaataataacagtaaatactcactttgtacttactgtatgccaggccccatcctacctatgtgatatattaattcatttaatccttgcaacaactctatgaggtaggtaccattattattttccctttacatatcagaaaactgaggctcagaggttaaataactggcactagtctagctcgtcaaggggcacagccgggagtctagcatctgtgcaatctcctaatcatttctgagactgcgtgtctaagggccctcagacttcgtccttggggtaaaggtatcaatccgcaggtctgcctctgtgttggggttcagcctgtgtgtctaaggctggggctgtacatctggcagttagactttgttcacactatgtccttaagtcagactgatttttaggtatcacagcatcgaattgacatttggagtctggcacactctgtgctaagccagtgacatcatggtgttgtcagggagtacagggtgtttcttgcactagtcacaggtctgcctttctgtagaaggtgggatctgagctccattaggattatccaggtgatccccctacccctagcccaggggcccccacatgagtatgaatgggagctgggggaagcaggttgagaggggagatgttaaatacaggcttcagagagccaccctgcttccatttctgaagtagctccttgtctgtagagaacccttcattaaccagggcctggctgaccagtgtcctctggaaacaccctgtctggacatctgaggagttcattttctcattctccagcaaacacataatgttctctctttaaagcacaagttatcacccgtggatggatttgtccttttctaaggaacaaagactaactccctccattccccttgttggagttatctccccttgaaaggacactccacagagccagaaattctagaacagggaaaagtggaggggacgtgcctgtgaactgcagggacagaaggaaatgggtattgggagaatggccagccctccaaggggctgatgtctggcctgggtatggagtcccacagaaaggggacctgtgatgcagcttacattgtcccgtgagggaaccatgatcctggaacccagatgaggccaaggaaatgttctctgaaaaagtcatatttgagctgagaactgaaggaactaactgggagaagggaggaaagagtgcttcaggcagaggaaacagcatgtgcaaaggccccaaggcagaaggaacaaaacacattagaaaattcagaagaagaagagtggcgtgggtgcaaagtggaggggagctggactttgggttttgtttgcttgtgcccaggctggagtgcagtggcaccaccttgggtcactacaacctccgcttcctgggttcaagcggattcttgtgcctcagcctgctgagtagctgggaatacaggcgtgtaccaccacactcagataattttttgtatttttagaagagttgggatttcaccctgttgaccatgctggtcttgaactcctggccttaagtgatcaggtctcaacttcccaaagtgttgggattacagccgtgagccaccgcacccacctggaaggtcataccacagatgtttgcctttatcccaacagcaatgggaagttgtgtgtgtgtgtgtgtgtgtgtgtgtgtgtgtgtgtgtgtgtggtttaacatgtttaacataaaatttatcatcttaactgtttttaagtatagtgttctgtggcattaagtatattcacagccgggcatggtggctcatgcctgtaatcccagcaccttggcaggccaaggcaggtgaattgcttgagctcagaagttcgagaccagcctggccaacatgccaaaaccccgtctctacaaaaaacataaaaattagctgggcgtggtaatgtacacctgtagttccagctacttgggaggctgaggtgggagtatcatgggaggctgaggagagaggatcagttgagcctggaaagtggaggctacagtgagccaagattgtgccactgcactccagccaagattgtgccactgcactccagcctggacaacagagtgagaccctgtctcaaaaaaagaaaaaaaaagtatattcacagtgctgtgtagccatcaccactatccatctccagaactttttcatcttcccaggttgaaactctgtactcattaaatgataactccccatttctccctccttacagcccctgacgaccaccattctactttctatctatgaatttgagcactctaggtacctcatctaagcggcatcatgcactgtctttttttttttttttttttttgagatggagtcttgctctgttgcccaggttggagtgcagtggtgcaatctcggctcaccgcaacctctgcttctctggttcaagcgattctcctgcctcagcctcctgagtaactgggactataggtacctgccaccacgcctggctaatttttgtatttttagtagagacggggtttcaccatattggctaggctggtctcaaactcctgatcttgtgatctgcccacctcggcctcccaaagtgctcggattacaggcgagagccaccttgcctggcctatttgtctttttatgacttgcttatttcactgagcataatgtcctcaaggttcatccatgttgtagcatgtattgaaatttccttcctttttaaggctaatattctactgtatggatatgccacattttgtttatctattcgtctgtcagtgggttgcttccacctcttgactcttgtaaatagcactgctatgaacatgggtgcattgaggggttttcgacataatcataataattgctttatggagaccagcttggaggagaacaagatggggaggaagtgtggaaaccaatgagaaggctctcagggtatagcgggaatacagaggacgcatgatgatgcctggacttaggtggtaccacagggatggagagaagtagatagagtcaagctatttaggacgtgaaatagacagcatttgttaatgggagaggtgtggggcgagggagaagaatagagggagaaggaggagtaatgggagctcaccagcagcccccatgttatgcctctttccttccttttccctcttctctcatcaggcattcagcttttgctgagtacttctgtgtctgacaacaggctgagcactcagcactgcaggacaggactatgcaaaaaacctctgggcctagtcctgggtgcactgctaattccctgtgtgaccttgcacaagacatccaagctctctgagcctcggattccccacctgggcaggaagagtaagtccctgcctaagtcatagggttgtaatgaagagcaaagcagaccatatctgttaagtgttagggacaagacaagcatgaggcatattttcaagtctcggctcctgtaggcagctctcactaagggctaaagggcttctgatgcctgggatagaatctgtccggcagagtggagtggaggcagggggacagccttcagctgtggaattcctccagtcctagagaccagcctgagctgggggacattattccagtcctgaggcatgagagcagaaggccgatgcttctgccctccatcctaatgtcctcctgcagggacccaaggtggatggcatcgatccccccgggtgagctcagccctgggcgcatggtggggcccaacatctcaacctgtttcctaaccctgagccaggcaggacagatcccagatttgtgcccaagagatgctctggcatccatgcccaggcccacatagggatagagggcagggtgaaagtctctctccctcactcgggtcctctggagaggggctctgtgtcatgaagctgaccttatccgcatctggtctaggagggaggagggaaggagctgccagtgctaaaatctcccccaccctcaaagggggacttcacaggttattgctggttttggttgttggaagctgacagtgatttattggcagattgaagtgagtgtgtgtgcgagaatttaggatagaatctactgatagcttctgaggtttaccttccccaggtcttaaatctggagataataaaaatataacagctaatgtccaaagagcacccgctgcgtgtgaggctcactgcactaaatgctttccatatgtttctcacaagaaccttctaggtagcactattatgattcccacttaatggatgaggaaactaagctctagaaggctaagtgactaatccaaggtcacacagctattatgtcacaggctctgagcccaggtgtatctggctgcggagccaccaccactaacccctgtataacgctgcctcacagaactgtggctggctctttccgtatcccccatgcccctgctccatcatcatgctgtggtgggctctgaactgtgaggacagggatccaggctttcaccctctctctgtccctagctgccagtgcacttgggcaaggtcacatcctatttctgggcctcagtttcctcatctgtaaaatgaaaggctggattgaatgacctttaagatttccctcacttggaaattccacaagtaagtcattatagcatggagcttgcatgcatgggctccagcgtcaggccagcccagctctgccagttaatgggtgtgtggccttggatctgttacctaacctttctgagcctcatttcctttgtctgagaaattgggggtgacggcagtgtactttctttgaaaagttatggtgaggaatagataagatcatgtgtttaaagtgcttacttggcacagtgcctgtaacttagttaaattcaataaataaatttcccattcttcccatgatcatttatttttaagggacatttgtctgaccagtttgatttatgagattattggtgtttttcatgaatgttaagacgtacgtgcgtcatcttagagtcatgtactctgatatattcacacgtgcacatccacttactcggaaatgtacacacccaggcacgcttattctgtctccttctctgccacatacttgcacacattatgtgagtgtacacacatgatgcacacacgtctctgcgatcttccatctctcctcggcagccctgctggtgtattggaccctggccttcatcaccaagaccatcaagtttgtcaagttcttggaccacgccatcggcttctcgcagctacgcttctgcctcacagggctgctggtgatcctctatgggatgctgctcctcgtggaggtcaatgtcatcagggtgagggtaagcaggccacctgggccagggtggggtgggaagcagaggctctggcctctgtcctgccctgggttcaggcccccaccctgcttctcagccaaactgagaagggatcagcttgttttacccgcccgtgtaaaggggagtggggccgtggcggaaatttcaggatagacactgcatctggcccacgtgtgctctaccccagggtcccagagggagaggggggtgatgggtgtgttcgctgaggttggcggatgactttccgtagaaagggaagataagcatcaggcactggcctctcctactttctttcttcgggggtgggggactttgctttaatgtattcatatcgtcacgctggtaaatgaatgagtaagtgttttgttttcctttctgtttgctcccgcctccctctctcttcctcaccccagactccaaccttccccttcccctgcccctacctccccaggcagcccagactaatgaactcgtttgtctttcccatgctttgtttttattagtataataccatatgtgtctgtctaaataaatacctattcaggttttttcctctcaacacaagtgaatatgtaggtttcccccacggtatttatcttgtaagaatgggatcatattatgcagttttctgcactgtgcttttctcacccaacaaatatctcttgggactccctccaagccatctgatatggctaattccgttttcttaatggctgcataatattccatcgtatggatgagccataatgtgttcagctatttctctatggatgggcatttactttgttgccaagttcttgccttcatgaataatggtgtgttgaacatacttatatatttatgtattgctgcttttatttctatgggagagagtccaaggaatggcgttgctgggtcaaagggtctgtgtattttaaattttgatcagtgttacatattgccttccagaaagactgtaatctgccagcaatgagtgagaaaaccctttccctgccttccaaccagcagtgagggctacagccctttcgaacttggactgcctgcatttctctgactcttctgcttttagttggtgatctgcagggcacaaagctccttatgtgtccccccatccagtgaccctcacaggaaccctgtgatgcaagcaccatcccctttatagatgaggaaacattttagatgaggcttgtccaaaaacaccttgctagtaagtggaggaggcaggattcaaaaccaggtctgcatgacttggagttctgtgaactgtatatgaaacatggtggtatccttagatctgtggagaagatagcatatgagagattcctgctcctccccaacccaacctaaacccaacccagcctagccatggggggttcaaagtcgacctcaatgagcagttacaaagtcaggatgccctgacattggtggccaagaagtgttggggaatccttttcctggtaataattacaggcgaaagatggccccatctgttagagatcaagtgtggaatatcacaaccccagatccttgctggggcaaggtagggagtggtgagaagttggacttacccatcccccatggcccatgtgccccacagagatacatcttcttcaagacaccgagggaggtgaagcctcccgaggacctgcaagacctgggggtacgcttcctgcagcccttcgtgaatctgctgtccaaaggcacctactggtggatgaacgccttcatcaagactgcccacaagaagcccatcgacttgcgagccatcgggaagctgcccatcgccatgagggccctcaccaactaccaacggctctgcgaggcctttgacgcccaggtggtcagtgggggcacagccacaccatctattcactgccttctggtttagggtcacagagagggacctcaaagggcattaggtcaaaatcctggtgggacaagaggggaaactgaggctggtgaggggaagaagcttgccttaagtcacacagtgaaccagggacaggtgcagggctgaggattcataggacaggcacagttggaatggcccttaccgtttaggtcgtctagtccaaagtccttatccagatggggaaactgaggctctgagaagggaagtgaccccactggactctcacatccctgtgctctttcctctgcagcttactgactataaaggttggagtgttcacttgatttggagcaggggtgttagtggcctgatccttatggtaactctatgagttgagccagacaggaatctccccatatcactgaggagcaaattgaggccctgagaaaggctgtgacctgcccagagctggccacagctggcaggcggcagaggcagtctcctggctcccagtccagtgctccttcacttcctctgccctcgcaccagggcagttgctgaggcagacacggtggcaggtggtaatgagtgagtgtggcacatggccacctcctcattccagtgctgtgctcatcacatagtccctgaccagctgtgtgaccttgagcaatcatctggccttagtttccccatctagaccatgttggtgttgatagggccctcccaactgtgcacttgctgattccatgatctcttcctggagttcacctatttgcagaggatgtgaccactgggtttccccagacaacaggagctaggggcatcctgggaggctaggcccagccgtgaattagccctcaggcactctgacctggccatggtctctctgggcagcggaaggacattcagggcactcaaggtgcccgggccatctggcaggcactcagccatgccttcgggaggcgcctggtcctcagcagcactttccgcatcttggccgacctgctgggcttcgccgggccactgtgcatctttgggatcgtggaccaccttgggaaggagaacgacgtcttccagcccaaggtaggcagccccaggggtagggtaaggcaccctctagatggttttcagttgtttctgagagtgcaacaggccaatgtgtgtgagccatggccacactggagtggctcctcacacatgcgcaaagcccatagcagtatccccaccacagaatactctacatctggtcaacagaaatgccagagggcgagcctatgccccaagggtatcctactctcctctcaccgtcactaccatagtacctctcccggtagttaggtcagtccgaaaactgcaggaagtgcttttgtttgtccagtgtctagagcttctgtgacttggatttgttggctttcagttcatgtcatcttagtaaactctttaaaagttttcaagatctgtcttcttcagtcctgtaaaggctggcacttgagctttctgcaggggcatcttgggagctactgtcagaggagagagaagtgggaaaccctcacgagtggagctttgtctctccccactccaaatttcattcaaagctgcccgtagttttattaatatgttggacttttccattaaaatttcttttttaagaaaagtttccatggcttaaaaaacactggagacttattagactagattatatccaatggccttggcagttgtaacgattctgcaaactgaaatttgttggagctagaaaacctttccccggggttatttgccctgcgtggggccgtagcatccacttcgggggctgggcagactgtgctctgttgtctgtttccttgcagccgtttaggtttaaatggccacaaaatgaaaactttttcacccctaataagtttcagagttttagtttccaagtgaggatgtcattataacattttaaccacagacagtctgaaaataatgcagagaatggggaattagggtttttaataatttatgacaccctttgcgtaacatttgttcatctcatgagctccaaaatcgcagccagcagttaatcctcaggaggtttatgttcatttttctggagacataattagtcagctgaacagttttggccacagatatgagatacgttgagtctgatttatgcagcaaactttcattgaacactgctgtgtgccaggcctgggttgggctgtgggaatatgaaagcaatagttatgatgaggatgattaacaatattaacagccacttactgaccacataatacatacctggctgtgtgcaggagttatccatgtgttatttaatccctaaaactatcctttggcgtgagtatattttgcaacatctttactgtggtatacctcaaatactgtacagtttatgagatgataggtattcttatccccattttacagatgagaaagttgaggctcagaaagtttaagtaattttccccagggtctctcagctagttaataacagaggcagaatttgaacacaagactcactccacagtctgggcatttacagccaggaagctaaattgactattattatcaagccatcacctctggctccaaggattatgaaatccaacagtgaggagagaaatcaaaataaaatacttttatgctatgtgttacatgtgactcttaggaggaatattcagggaattgtgggaaaagatagtgattaacttagccagtggtcatgaacagcttcatagaggaggggatgtttgaaaggggtcttgacggatgagtaggaatttgccaggctgccatgggaagatttcttgctcaaccaagaatgcaaggaccacttttgcttatttaaactttgatggcttttgaagccatatctggctttttgagcctctctactttacctggcccataaaagagaggggaagcggctgcttctcttgtctacaggagtgtcacctttggctctagcctgaccataggctaccccagaatacccccattggcgatcctgaagcagcatggagccagttgttaatatcagggggaaatggcacaggccagagcccttatcagagtgtccacaccacgctcttcttcctgtgtttcccaaaacccttgtgggattctgctaaggagagagctctgaggcaggacgtgccaaagagatggcgaaagcacttagaattttagttcatctgaacgttatcattgccgtttttttctctttgtttatacacaaaccctggggtttattaccgtctcattggaatgctcttgtcccagttacttagcacacaaatccctgagacagatggccctgcctcagtggcagtgggccttatcagatttaatattttttccctgcagcccaaacacaatcagaaaatttccgacacagaaacaagagttgaaagtaaatatagtctccagtgtccgcaacaaagaactctccatcatgtggttgcctgggatgtggcttaattctcatgtgggcttctgagctcagaaaatgggggaaagggatcatttactgagatcatttggttcatctcccagcccccaagccattctaatccagagagaaccgagtgctattctggtctttatgaatgacaaagaaggaagctccctagctacatgttgcagtgtttcacagtctgggagaggaagccgttttttctgcccagcctgaatccatcctgcagcagttggcacagcgaggcacctgtggtttattcatcatcactcttccttcctaagatactcagagttggcaagaaacatgtcatccttggtatccgcaaggacgaacatttctgatgtcctctttagttactgaaagtgtctgtgacttgccagatctttgatgctcctgtcaccccgctgccactccccagggaaagctgggacccaggttgggctctgcctatgatctatagctctttccagcctcctctccaacccaacccctactcccaatctgtcacctcccatggatgccactgatctggctgaaggacaagagaattagattcataatgagctgctggtgtctgaaacctgccagcactgccctgggctatcagttgagccaaaggaagaaggaacagtctgggtttgatcgaagggctaaagcttcaaacagcctctaagtctcagtaggaaaatgtgtaggtttgggagggtgtatgtgtttccgaatgagttcccctaagaactgcttatggttctatatgtgtgttctgtttgtccctgtgtcttttggtgtgtctttttctgcgtgtgtgtgtgcatgtgtgtgtgtctatgcccccgtttggattgccatatttgtggctatcattatgagtgacttaatgagtgtatatgcattggtgtttctgtgactttgtggttttgatgcatgggctggcctcttcataaccatgtccatgcagctggtctggcctagagtacctgccttcaattcactagctccttcttggccatcaagactctgctcaaatgtcacctgctccagggagccttcacctggttgaattagatgccccttatctgtgctcacataacatcctatcaaagcgccctgtttctttccctgacttgatcctctgtcccctattgcctgacctctgtgtgcccagcactcagcccactgcctgacacccaggagatgcacgggaaatggttctgcaaagaaggaataatgcagcaattactatatattgagtgcttacacttactgttttttcacatgcactgttacattgacttctcataacaactctctgaagtcccttcatagcctcaccttacagatgaggaaactgaagctaagagaggttgaggaacttacctaaggacacagtggctaatatatgatgagtcaggacctctaagtccaggctcttaaccaccgtgtcaaacagtcttgtatgaatgggtaggtgtgttggtctctgggtggccaaagataattttattctttacccagggcctcccggggctgggacctacggacaactcaccttttgacacctgccaaaataggaaacaagagtccaagtgatcccctctcctttaagcaccagagaacatgtgaaggggacctttccaatcatacctctggcctggcagagacaatggggctccaaactgtagagtcgggagtgctgggttttagtcctacctctgcagctaactcatttattctcctcagcagtcacattctgcaagcctcaaatgcaaaatgtgtaataacttctgtagaaagtacatgggggcatgaagatcattggcttgattgcttttaaaaaatcggtattgagcactactggggaaatccctggaaacaaacacaattcttccctgagagcttgtgaaaatgcaagactagggcctatgattttccaaagcattttcttccaccaagtgtcaggttgtaggtccttggtcttttctctcttgccttggtacctgcagggtgctgaccagtgctatcatatcccctccccgtttcctaggaccctcttctcggtagactccaacagggcctgccttccttgggcagcatggcaggcctcttggctagtctagtacccacttcttttttttttttttttttttttggatggagcctcactctgtctcccaggctggagtgcactggcgcaatcttagctcactgcaacctctgcctcctgggttcaagcaattctcctggcccagcctcccaagtagctgggattacaggcatgcatcaccatgtccagctatttttttgtatttttagtagaaacagggtttcagcatgttggccaggctggtctcaaactcccgacctcaggtgatctgcctacttcagcctcccaaaatgctggaattacaggcatgacccaccacgcctagtcaggtacccacttcttaactgaaacttagctattccaggttctatcccttttaaaccaactctttgaagagaggtctaataatgacccaatgacttatagctgcagtgagatttttattttaacaggtcacaaaattctcaatccacaaaagtagatttctgaccctaggttattttgttgggggcggagagaggaagtcaaaggttttgcagcctttagagctgcaaaaccagaatttgttgttttgttaaaaatgcacaaataccgacgagtatatttaagtaacacccatagtctaacgaacaaacatgatcagttggcttttccagccctcattctccagcctgtgtgttttctgctcattgtaacacagcgtgtgtgtggcattccatgtttctccagagctttcatgagaatcagtggtcttggatgcatagtgttcccatgagtaccttaattacctaaccattccctgtggttggaaatttatatgggtttttgcattctccttctgctctgaccccaaaataaatgtctgtgttcatacagctattaccttatgtgaaattattttctttgggataaattctcatgatgtgttgttgctttaaaatagtggactccagtctccagagctgcgtctctgcagaggacagtgggacagaagaatcccagggcatgttaaaaaggaccgggtcttcctaaacccacatgcctatatttctgacccagtaccagccaggggggcaagtttccatcccccacaagtcacaaacctgtaactgacactaggatgcttaaggtcaaaggcctggacgaggcctagacagtgggtctggggtagtgtttttgacatcactcaggttcatgttcacatgttgtccccttaccagcatgtgaccttgggccagccactaaccctactgaaactcctttttttcatgtatgaaatggggctaataatggtaccctcctcattagggtattgtgaggatagagttttgcacctgataaatattgtctcctgccccttcctcccctggaaattcaggtctctccctgcagcctaattttaaggcccatttttctgcttccagcccacccctgcccttctaccttcgacctcctccctctgcctctccctctggtgcactggcaaatgggacagagagcctcggtagggccttcctcttagagtcttgcacgcatccctcagtggtctccctgtggctgcttcctgctgccaccaacagatacagacccctgtcgcacagatcatggtagagacagtggtgagcaggaccagacagctccagggagcagtgagggctggcttagagaacctctgttaaactgagaggccaccatcaggaagctctgatccaagatccaggaatccctgactctagggaaaggcctccaatgagagcctgggccctctctgcctgattctgattgtggatgtgccctcaaactccttctcatcactttgttccatccctctttaccctgcagcagctcccacaccctgccaaacaggatgcacagtccagggcagtgtctgagaaagagcagagatctgtcttcatggaaatattgatgtggctctgctggggagcaatggatttatcaagatcaaagttttcctgggagttattgatgcttaatttggaaatagacacactgttgatccctggtatctttagcaacaaagttaaaatgtttgtttttcttcactggttgccatctgagatcttgccggaagtacacaagagaaccttaaatttaacaggaggccctgggagcccatgaggctggcgggcttgggtctgaaatcttttcagtctcttgtaagtgatgagctctcattctctcctgagagctctacggtgccatgttttccactggccttttctgctcagtaattgctacattacaggctgttggtaagttcggaacaagggagctgctgattccatttctgtagcagagaacatgcaccgtgagacttgttgtaccagttcaggttttaggtgctctatttattcttgccccattcagaatgctctcccctgggtctgtggccacaatgctaagagtcatatttatgggcctgcagttgtaattgggccccattctgttcccccaagtggaaagatgaacagggtgtaagcaaccttccctgtagttagaaaaacgtttagttggatttatcagtctgatttttcactcataaacaattgcacaagcctttgcaagcccagagggtcttgtaataatgatggccgtggtccattatggcacagtgatgtgttctacggtggtcattttgctggcaatgacagtcacctctgaacttctctttccaacagacacaatttctcggggtttactttgtctcatcccaagagttccttgccaatgcctacgtcttagctgtgcttctgttccttgccctcctactgcaaaggacatttctgcaagcatcctactatgtggccattgaaactggaattaacttgagaggagcaatacaggtacttggatgattattttttcactttgccataagaaccattattaggaataatgtccatgagtgttattcatcctcatggacactcaagaataattctgctgtaaatttattttttgttgcccattaacgatgttttaaaacagtaaccattgacaaggcagtgtgggatagtggaaaatatcttgggctgaacttgggagacagtgtagctctggctctggttctgccttggactgggtctgaaaatccagctgctcagcccttggcttgaaagtggtagacgtcactaattgatcacagcactctttctgaccaagggtaaatgcaaccttggaatcctctctaagtggctgttccagagttctgctaccagacagtcttctttgggtgtgaaaaaaggaatgtgcttgacatacaaggtctagatagcctctaagacagggtcccctctaagatggggtattggtccatggcctgttaggaactgagccacacatcaggaggtaagcagtgggagcaagcattactacctgagctctgcctcctgtcagatcagcggctacattagactctcataggagtgcgaaccctattgtgaactgtgcaggcaagggtctaggttgtgtgttccttatgagaatctaatgcctgatgatctgaagtggaacagtttcatcctgaaaccatccctctcccccaggtccatggaaaaattgtcttccacgaaaccagtccctggtgccaaaaaggttgaggaccactgctctaagttctatttgaacccttaagtcttgctcactaatgagagtgacctatttggtctgttgggtcacttaagtctaggctcttggtcctgccttctgtgatttccttcttagagtttctggaaagatgatcaaagccagggagtgttcagggcccctctgaagaaggtgatgatgagagttgtccaagtcccagggtcttcactaggattttggttcagctatcagactagagagacatcctgattgagagtagtttaaatgggatagaagtttgtttattcttcagatagagtcagggctgacacaggagctactcaatgatcagagacctggcttcttctgtcatgttgctctgccagccttcttttgtgacttttgtctccatagccatggtgggtattgaaactgccactatatttacatttaaactagccagaagaagggacaagaggagggaacgcattttccttttaaaatggtaatacctgatttgcacataccctctcgcatcccattggtgagaaagtggccaaatggccgtatctagagagtctagaaagagcttggtctttattcttgacagctatatatgcactgctagaaattctctgtgcaaagaggagaatgggcattgggaataactagatgcagctatgcctagtgatgtccatgaagttgtggtaaaatcctgaagctaccttgttctttggaaatgttcctcagaatcattaacattagtcatgtgggagacaggagaagaagctctgcagaaaagggaccgagaggacaaggatatagcttgggctggggacaatgtcagagtccaaactctggctatcttggaatagtctgtgtgaacggtgccctcccaagttgtgcagtgcacaacctgtgcagctatatatggcaaccctgcccatccccagtggtttctcactgggaaagcagagtatttcctcagggatgtcattatgtgacaatagtggaaaaagcccaggaaaatctaagaccttctaagactcatgggggcccagagctgggaggaaccaagctgttgctcagttcagaaaacttctctagaaatcccagcctctcctcacacccctccagtgacaggcagacttgcaccaccacaagcaacagccacttttgtggttgggcagttttgtaattaaatatactaatgtgtgtatgtcataaattacattttccaattatgccaaaagagccaaaaatggttttttaatggttagcatataatcgtttttatcaaattgcttgaatctttcatgttaataagagagattcattactatgccacaaaaagcaaatactggcattaattatagaaacaaattaggggggtggagcgcaatggctcatgactgtaatcccagcgctttgggaggctgaggcgggtggatcacaaggtcagaagtttgagaccagcctgaccaacatagtgaaaccccatctctactaaaaatacaaaaattagccaggcatgttggcgtgcacctgtagtcccagctactcaggaggctgaggcaggagaatcgcttgaacccagcaggtggaggttgcagtgagctgagatcgtgccactatactccagcttgggcgacagagtgagacttcatctcaaaaaaaaaaaaaaaaaaaaagtggctcatgcctgtaatcccagcactttgggaggccaaggcgggtggatcacaaggtcaggagatcgagaccatcctggctaacatggtgaaaccccgtctctactaaaaatacaaaaaaaaattagccaggcatggtggcgggtgcctgtagtcccagctactcgggaggctgaggcaggagaatggcgtgaacccaggaggaggagcttgcagtgagccgagatggcaccaccgcactccagcctgggcgacacagcaagactctgaaaaaaaaaaaaaggaaagaaagaaggaaaggaaaggaaagaaaggaaaggaaaggaaggaaagaaagaaagaaaggaaagagagagagagaaagaaagaaagaaagaaagaaagaaagaaagaaagaaagaaagaaagaaagaaagaaagaaagagaaagaaagaaagaaaaagaaaagaaaggagttagggagaaaaaaaccctttctttctttcttttggagatttccggaaaatgtacccttacggatgagagcctgtgtcttcatgggttagagaataaccacgctttgtgcataaaaagttattaagcacaattcctgaattatacataattactagctgtcagtcagttgtgcatttctgtgtatgctggtcttcacttaataagactttatttcacagatcacttggtgtccctacttcactgaaactaggtgattatcttttgaagtctcatttcacataacctaggaggtatatagatttctttaaaaatgtcattgccattattttaaaccttacccatggtatatataaacttacagaaagacagaataggttcattattttaaaccttgcccatggtgtatattagctcacagaaagacatagaataggttcctgccttaagaaaacctgacccacaaaaaagcctgggtttacacaaaagaggaattaagggcggggagcccaccttacaacagaatgaataatagaattttatccaagagcaggcatcctgaggacatttaagacccggatgcatttttccttgttcaagagcacacatccaaaaattgcagtctttctgcgagtcatgatcactctgcacataaagcgtttaggttcagagctcggggaggccattaccatggctgctctctgtctgccctgtgagggtccttggggtggctgcactctggggatggtgctggggctgactgactcacgcggtcgtgtaacacatcagaccttccaaagtcgaacccttgttttgtttcaaggctcaattatgacaggacttggtctcagagcagatcccctccctaggctggagaaggccactttaaaacagatggcctgccccacttcatcatttttatggctctgatctgtgttctccactggcctctggtaaatcaagaatacaagtggacatgaagatctgctttaaaaaataaagaacagaccgggtgcggtggctcatgcctgtaatctcagcatttggaggccgaggtggatggatctcctgaggtcaggagtttgagaccagcctggccaacatggcaaaaccccatctctgctaaaaatataaaaattagctgggcatggtaggcacgtgcctataattccagctactccggaggctgaggcatgagaattgcttgaacccggaaggtggaggctgcagtgagctgagatcatgccacttcactccagcctgggaagcagagcgagactctgtctctaaataaataagtaaatgaattaaattaaataaaaataaagaaccaattaagtcctgtctacaggaaaaggccttacttgctggagaagtagcttgctgtgctggagtagactagtaagttggaacggtgatacagtaccaccttacagagctgctctagggcaccatggggactgtctgagaagcccctggcacactgtaacaggtggcatctggtgtggtgatgatgatgagaatgatgatgaatgtgaaacactctgctctcatttctagaccaagatttacaataaaattatgcacctgtccacctccaacctgtccatgggagaaatgactgctggacagatctgtaatctggttgccatcgacaccaatcagctcatgtggtttttcttcttgtgcccaaacctctgggctatgccagtacaggtactagatgggctgaggggaagggaggggggcagcaggacacacaaccagaatctgctggtccatggccagtaactaggagcacaccgtcttccactccatgcttgcctgtacctttcacacacttggctataccacaggctgtacctctgggtccctcctgtcccatactctgcaagcactgaccatctctcttaatgaccagagaaggcagtatcattaagactttaaaaatggagccaactttataaactatagaaaaatcaagccaggttcaggggctcacacctgtaatcccagcactttgggaggctgaggcaggaagattacatgagcacaggagttcaagactggcctgggcaacacagtgagaccccttctatgcagaaaaaaaaaagaagaaagaaaagaaaaatcgtacatggaatgcccacagatcttaaaagctatgttgtagcaaaatatttaattacatcaaaaagtgttagtgatgtatttttaagcaaaaagagtaagttacaaatagtatatgttgtatgcttactactaaactggaatatatgttatgtatacatttgtacagattcacacatgaaaaagaattggaaaatcacatagtgggattataagtgatttttattttctttatgtgtttctaaattctctaataagcgtgtataagatttggaaatcaacaacatgatacttttagcctaggcaacaaagtgagaccctgtctgtacaaaaaattagctggaagtggtggctcacaactatagccccagctactcagaggctgaggtgggaagattacctaaagtccaggaggcagaggttgcagtgagctacaatcacaccactgcactccagcctgggcgatagagtgacaccttgtctcaaaaacaaacaaaacctggtgttttttagccagatgtggtggtgcgcccctttagtcccagctacctgggagtctgagatggaaggattgcttgaccccaggagttcaaggctgcagtgagcaatgatcacgcccctgcacttcagcctggacaacagagagactcctgtctcttaaaaaataaaaataaaaacgttaaaacatggtatttttttaaagcaagacaacctttggtgctggctcaggaagaggtacattaccccccaataatcagaggagaatcgtcagcatgattgatctgacctcgggcttcatgtgtcccatctcccacccggagctcttccaccacagagtctgatcctgtcctatgcctgggactaaatcttcaccctggtgttcaggccagaaaccgaaatcccagacccattcccagagggcgggaaggttccaccgggagagcttgatgtagcagaaagtgacttgggtgagacaggctgattcaaatacttaacctctctgagccttggtttctttatctatgaaatggggaggctgcccaccctctggagttgctatggcaattcagttagataatgtaagtaacacagcaggcagagtggcccccagagtcttcacttcgtaaatatcagatccctctaccttgcacatgtttggtatgagtgaggtgttaccaatccagaatccattgcttcttgggataaagattccataaaccttcatctccagtgatttgtattggtcctccttacttgtaaagcttagagtttaaaaatattaaaagaaaaaaaggggagaggctcccacagggacacagctagacaagatgagatgcagggaatctgatgttcttttttatgggaacagtcatatatgccatcccccattaccacctacccatgcccagactgcccccgctccattctgccaagacagatcaatgactataaaagctacaaaagggcctggagatctcatctagtttagttaccaaccaaccttttatgcacaagactttctaagctgggtgtggtggctcatgcctgtagtctcagccactcaaaaggctgaggtaggaggatggcttgagcccaagagttcgagtccagcctgggcaacatagagagacctcatctctaacacaattttttttttgaaacatgaaaaatgaagatttctgaccatgcttctctcattagttaacactttgggctgtgagggtctgatgcagagagacacagcctgggaggatcctaacatgtacacagcattcaaaaggctacaagacactttctgttgtgtccccttgaacaagcagtttgtaagattttgttggccaggcatggtggctcgctcctgtaatcccagcactttgggaggctgaggctgatggttcacctgaggtcaggagttcgagaccagcctgaccaatatggtgaaaccccgtctctactaaaaatacaaaaattagccgggcatgatggcgtgtgcctgtagtctcagctactccggaggctgagacaggagaattgcttgagcccaggaggcggagactgtggtgagctgagatcgtgtcactgcgttccagcctgggtaacagagcgagactcggtctaaaaaaaaaaaaaaaaaagaaatcaggttttgtctactaaacctgctgcacggttaccgttactagtactcacagggtttgttgcacatgcatcgttgctaatagtgctaactaatattaacagcccttgccctatgcctggccctgtcccagcccccctcccttgtataatttaacccttgcactgggggtagagattttcatatctactgatttcttacctttgctcatttatcatggagtgtcctttggttttctgtgtttgtatatacctttaccacttatagatttgaccagcactcaagaaccagtgttactcctgggagttaatacaatcccagccccatggcaaagaaactcatgtggttaggattctgtgtgcagcctggttagccacagggcacgtaaggctttttataatattgacatgagtgcagaagccccattcccgtgtaagccctgagggctcttgtttcataatctttttttggtcacatgcacacagctttattgagatataacccactcatttaaagcatacaaatcagtgggttttagtgtcctatattcacagagctgtgcagccatcatcacaaatgtggaagttttcatttccccaaaaagaaacccgtacccattggcagtcactcctcatcttcgcccccagcccttggccaccgtttatctacacatacttttgaaaggctagtgaaactttctcagaaaaataaatgcttgctcaaacatttgggctataatttcaggggcttcatgggtgcccccctgacatttatcaagaacaccaggttaaggaatttagctataatggaggcctctgtgtttcccagtctcctgggtatcagaggcccagagagggcaggtgccttaccctgggccacgcagtgaaccagtggcagcaccatactcacacatctcctttctgcggttccccagtgacagagttctcaggaagctttttcatttattttctgagaggagggtaggccatcttgtattgatctccaactatatgccagccacaattctaggtgcttatcataaaggttcatttaatcttcacaatagtcctgcagagtggacagagtccttcagagtgggcattataatcaccattttaaagatggagaagctgaaaaccagagaggttaagtaactcacccaagactgcacagcaaaaggctggggctttgaaactcagggccacagactccaaagactatgtcctccccactatgctagatttttttcctaacctgtgaataggagacaaaatagtccttttatttctcacagttgctttgcacactcagaatccatgatttcttctgcatgagggccattcagacctgtgcagaagagagtaatggaccaaggagtcttgggagcacctaggaggaggggatgggggagcatgaggaggagccagggaacagcagcagctgcagcaccagctcccaccccagcctctgccagtctcttggaggtggtgtgggtgcagacaccggctcacaaggtgccctgttagtgagcttggggtgccatgggagccttcttgttgtcaggcccaacccaagctggctgaagaacaccctgatggcctccatttgagcacaactaatgaaggactggatgccagagataagtccaggagggtgatgctgcagggcaggccagggaagagggtacttcatctctatcatggtcctctgcccatccatgccagcatctaacacctgttaaacactgggaggcaggtggtgaaggggccacttcccagcctctaagatacctcctaagccaggaggcattctgtgattaaattacagggcctcccacttactcctttatccttgaggcggtgctggaagcttaatgccaatctggtgtagggctctgggactacaggaccaaggcaagcagtcctttctctctctctctctctttttagctaaggaagccagcacatctgttctttgagaaaaagccctgtatttagaggtgtctgcctttgaaggcaacctgagaaactgtcatcttggcgctttggggactggccatttacacttctcataaatattcagaagtaggcagtcatttacataaagctaaatgcagaaggaattctcttttcagggaatacctggcagattcattaaaaaaattaaagaaaccaagagcataagaatgaaaagcgaattctcggaccccaggctggttttttctggcatgggtgcagtaactttgcctctttgctcagttatcacttttttccaatgacagtaaccataagccctgagagccagcaaatagaacaaaaggtgctgtcacaaacattgtgcaatctcatctctgagatttccatctggaaaatagactggagagagttaaggcttcaaccagccttgcagataaatgcagttagttaccagcccagcaaccctctgcttgcatgagagcccattatgctaacctccttttgaaattgctttgtttctcctccttccctgcactccactccccaagataatttggaaacctgggcaccaaggcttgtcccactctaggggactggggaaacagggattttgccagcacctcctggcagggcaaccatcaggtcaaagggacctgacccatgaccccttcctcagatcattgtgggtgtgattctcctctactacatactcggagtcagtgccttaattggagcagctgtcatcattctactggctcctgtccagtacttcgtggccaccaagctgtctcaggcccagcggagcacactggtgagtgcccaaaggtgtgtgtgttttgtccctcttcccctccttccctcgacagcagcaggtctcctcccacacacccacactgtcattgactttgactttgactttgagtaggccacttcacctgtccaggcctcagcttctttgtctgggaaatggagtcaatgggggaggaggctgcctcccggtgaggacaggaggcgggcatggcagtgacagtattgacactcaggccttcctctcgggtgggagacggagcagaagcctctcccctctgactcggggacccctgcaggagtattccaatgagcggctgaagcagaccaacgagatgctccgcggcatcaagctgctgaagctgtacgcctgggagaacatcttccgcacgcgggtggagacgacccgcaggaaggagatgaccagcctcagggcctttgccatctatacctccatctccagtgagttcaccccacacagccagccctgggtgctgctgcgtacatgcaaggagagggtgtcagagctcgggtaagagggggtgcagggacagaagcaggaggccttgagattatccgactcagtaggggagcctcaaactggctctgatagctaagctcccagaaatcaaagtactcttcattcatttatccaacaaacatgcatggaaagcctgctatgtgctggacactgtgctggccctcaggatacagtgatgaggaagagagatgaagtttcattcctcatggaactgatatgttattgacagacagcagcaagtaagtaaatgaccacagttttgaactctcctaagaatgaagactttttagtaagtcagactgagctgtcattgccctggggaagctacaagaaagcttccatccacttggggctatgcaaaagaaaaagactagttatccttaaatatcagaagcccaggctgaaggtactcacaggtgtagggactgaatttatattaaccaagtagtttgggaaccccaagccaaggaagaagaaaaagaccaaaactggtaaaagtcctagagtcccatatacttgaaaccattttactgagaatgtaaaacttttttttctttttttgagatggagtctcgctctgtcacccaggctggagtgcagtggcaaaatctcggctcactgcaacctccacatcccaggttcaagtgattctcctgcctcagcctcccatgtagctgggactacaggcacacaccaccacacccgactaatttttgtatttttagtagagacagagtttcaccatattggccaggctagtcttgaactcctgacctcgtgatccacccgcctcagcctcccaaagtgctggaattacatgcatgagccactgtgcccagcccaaaagattttttagaaattgaaattttagttatggaaattaattcagtgaacaatggtcccctggtcagagtgagggcttacggaggtcaggtgatccatggagtcctggcccaagtttatctcacagttggtctcgtggctccgtggacccatcccatggtggttacttcccaagtgcataattgggatgtagatatttagcaaccagctgacttcacactagttccctgacctgtccagtctaagagtcattatggccaagtggaagcccctggaaagaagaaaacaaaaaagaaaccaaaacttactcagtgcacaggttacatgaatgagtatagctgaagagagaatttttgaattagaagacagatgagtggggattacacagaacgtggcaaggagagtaagttggtagaaccattttacagatgggaaattaaggccagaggggagtgtgttcctgagatccctcctgaggttagtagcatggctcggactagatcctccaaagtctcttaactcctggtctcaggctattttccacaaagagctgggggcctctgtggggtgaagaagacttaggacaccatggggcaccattatgaggccatttcctcctaggagaaaaaaaatctctgggctctgaaaggagtagaattagggtaggaaattaagagaggctaccgaccacctcctccaactaaaattggttcttttggtgccaggaagagacacacctggtgggggagggaaggtggtaatggagggggtgctggtagtgtctcccagatagacccatccaacaagtctcatggagaatgagacggtcactcaggtcatctgcgtattcttggcattcttgctgcctagagagagagtctgatggagctaggtggccaccaagctgtcccactccccaagacagtttggaaacatgggcaccaaggcatgtccctgtctaggggactggggaaatatcccatagcagtgttctcacagtatggggctggccatgaataccccaggagtccaacctccctttgtccagctagaccatggtgtcctatgcctcaggcagggaatgtggtccagtcatcagtggctgggccgtctgccatacatggtgcaagccatggcgttttatgcagaaagtcctgctagcatttgattttctcagaatggagctgtgagcatggcaggcaaccactgtttcctggattcttcaccaagacaccccaagttcctggtctctccccgttatcctcatccctgaccctgtggttctcagagcctccaaacacactcaggctaagcactccatagacaggggaaatttggaaggaacatctagggagctcagaaaagccaatgtccctagccccaggcccacttcaaccttctctctgtcagtcctgcctgcccctggaggctggttacatgaagagtaaccccctgcttgtgtatagccccccagttttgtacaggtttagagacagttcccagcagtaggaacagctgccgaggtgggagagggcttctcccgatagccgggggacttcctctcccaggaacaacagggtggggtagagcaggcttgtcgttgctgagatagagagagggaagggaaacaacaaggaaagtgggggcactgggtccccaaggttcctggcacagcaagcagtgaagttggggcagcctcaggtcatgtagtgggggcaggtgacatctgctttgactgctcctaagagatatgtactcatctcctggattccaaactgcagcctgggacatgttttcttatataaacagcatcaaaagatgtgtgagttcccaggctagcccactgaaccctacctagtgggtgctcattgtcccccagagcccccagaagacaagccgtggctttgtgatgggcctggggccaggaggacctagggatatgttgtgaagagctgagaagactctggaaaaaaggggctctggagccaagcaggagcccgcccaggactcctcacgtgtccaagtcacctagggagagaaacagagcagcccaggttggtccctggaagagagcagcggaggaggggaaaggggagagcccctggggagagctttgaaagtcaagtgctgtttgctcagtgtgtttgcctttccgaggatgtgtttttttttccctccgttagtcagcagtgggagggggagagagacgggtggtagggtgcagggtacctcctggctgcaggcatatgctttgagtgcgtgttcatttacctcctctggacttcctgccttctgttaccagggatcaagacacaggtcattaggcgtgaggtaatggggcatctcttgttctgacccctggcgccagtcttggagtcctgacgctgcagaggagccccagagtcacatttcctgttggggcccatcctgctcatatgcggcaccatcagacttctgggcaggcaagattacctgtgactctgtctgatggtctcgccatcaatatcactgagagtagctgtgtatggagtcccgaactggtacaggataaaacagggggctgaaaagggaatgaatgggcacagtttctctggcatcaaaagtcacatccagaattgatatttcctgttgagtaaaaatagaaatataagttgctcagtggatgttgagtgagccctattcatgtgccccactctgtgccaagcaccaggaaggagggaagggaaaaatgataagatgttctccccgttctccaggagtttatgctccactaagaagtcagagctaacatgcacagaacagtgtggcagcgagagcagaaccgtgtggccagctccatgcttgccgcctagcaagcgtgattgcacttcatcctcataacaacttggtgaggtgtgttgctctgttgtcccattttacagcagagaggactgactctcagtgaattgaaatgtctcagtgaggtcttccacagcaaaaggcgaagcacagagaaggaagtccatgtgggctgggagttcacccagagattcatgtaggggcaatgtgggctgtaccttgcaagatggtgggatttcaatgaggagaagacaaagtgggaggaagctggagacaaggactgtggtctcttcctttagaagtcagttcaatctttttttccttgtggaagcagcataactctaggtggttcctctgtatctgaggacaagctttgtagaggtgacaaaggggtcctaggtcctatcaggcaagcactcgatatgctgccagttcattctgtccattgtgagatacccattccagagcgcttcctctgtgccaggctctacggaggttctggatgttaaagaggaagcaggcatggccctggccctcccagtcttgtgggagattgatcatgcccatgaatagtgaccatgtggtcagagccacagggtcaattccaaatgcccctgtttctcttttgtgttactcacctgactctgggtctttcgtttcttccattcattttttttaaacaaatatttcctgcccaccttctgtgtgccaggcctggggatgcagtgggagaagcctctgtcctcctcagtggaggcgctaactcagaacaggcagtggagaaaaacaacatgacctggagacctggtgccccttccttccccagcatctttgaaattcttttggttgttgttgttttgagatggagtctcactctgttgtcaggctggagtgcagtggcgcgatctcaactcactgcaacctctgcctcccaggttcaagtaattctccctgcctcagcctcccaagtagctgggattacaggtgctctctaccatgcccagtaatattttttgtatttttagtagagacagggtttcgccatgttggccagcctggtctcaaactcctgacctcaggtgatccacctgccttggcctcccaaaatgctgggattacaagcatgagccactgtgcctggcctgaaattcttcaatatctacctgcccttctgccagttggtgcagccacagtgggctgcttatgcatatcctggcctggcttggtggggagcatggctgagggagagccggggcacccatcaattaaggaggtaaagatcagtctgactgagatgcctcctgccacacttcctcagctgccagcaactgacaccattaacctgatttccttccccctctgttgactgcactgactattggactgaatgggaaacagccccgtgcacctcaaaatgcacttcccctcctgcagatgcatcttgcaattaggcccaaactgtgagcctgcatgctcctcccctggccctgcacaggcaacaaagctgaagttaatcagaggtacaaatggctggctatgcctctctgacacgtaacttctggaacatgtatcaatgctttggaaatgaaaagctcctggtattgcaatgccaggctggtgcccataagggccagaaaacattccttgggcaaagccagggggagtgggtgatctgatcccagctcaggtttgttgatttgttgttttgtttgtttcgttttgtatggggcaagggttgagggtatgaaaaacttacactatcatttactaccgtagtccccagaacccagcacaccagcacaaggcctggaacagggataccttttttgaatgaataagtctttttttttttttttttttttttttttgagacagagtttcactcttgttgcccaggctggagtgcagtggcgcgatctcggctcactgcaacctccgcctcctgggttcaagcgattctcctgcctcagcctctcgagtagctaggattacaggtatgcgccaccacgcctggctaatattttggtatttttagtagagatggggtttcaccatgttggccaggctggtctcaaactcctgacctcaggtgatccacccaccttggcctcccagagtgctgggattacaggcgtgagccactgtgcccagccttgaatggataagtcttaagggatatttttggaaaggatattctaaaaaatacccatgtctctacactattgcagaagggctttcagttttgatggcagcctttcaggccagcctacacgcaactaaacttttccataacagcatcacacttacacaagaagaaggttttataatccacttgccattatttaacatagttcttcctccttaactttcaagatctgagcactataatgttcttctttttgtttttgtttttttctaaatcaaattaaggtgagtcacctcaccttgggcctgagttggacagaaatctattcttggctatattccccacccctccaccaccttggaaccttatagaactttatgtggttcaggaaaatgagggcgaggcctcagatcttcaacccatgacagctgtatgcccagctccctgccttcctgtcttacccccagctagggcacaggactgactattgtgcccagagaggtgccagagcctgtaacaaccccagacttcccaggtccagccacatccaccccagagccccaaaagatgatcttcagagagacctttaaaacacaagtagctggtcacttccatccagaccagaacccaagatggctgtgctcttgctgagacatgttggttgtcattgcctccgagcccactttagccctcagctctgtaccagaaatgctgttcctttgggaatcacagccaaagaagagatggagcagttctggaataagaacacaagttcaaactgtcccatatctccccacatcactatctacagttggtctcttcccatggcgatgtccatctgccaccgtggcactggtattgctttgagtgcaggggtctctctttttggcatgttggccctgttactccctgggaactttgagtcttatttggaatgcgtgaagtccctgtgtccggggccagcactgatccacacagctaagtttgcactcatcttccctctcatgtatcatatctggaatggggtctgacacttgatgtgggacctaggaaaaggcctgaagattccccagctataccaatctggagtggttgtcccggttcttactgtactgtcctctgtagggctggcagccatgtgaagaacagaggttcccagcatcatcttcctacacattattacattcacccatctttctgtttctcacttttatctccagcctgggaaaagttctccttatttgtttaaatccttttgtgcttttagatccccttggagcagtagagtaccttgtagaccataagagtggaaaagggtctagttttctccttgtttctaaagatggggtggctgaaaaaactccccttttttgcctacagcttgcctctctgggcctagaagtggttattctgtctccatattggcctttgatttgtgctgagggtcagcttttggctccttcttcctgagacagtggaaacaatgccagctgtgtggcttctgccctgggggctgggggtgaggctttgggtgccactgcctgtgggttgctggcttaaaggacaattctgttcattggtgagagcccaggccattaacacctacgcagtgttattgaaagaagagaggcgggggtggaggggaattagtctatcccagctagagggagataaagagggctagttagttcttggagcagctgctttgaggagaaaatgtatagcttttgacacaacaggaagatccagaaaattatcattgaacatattaaaggttatttctttttcttgcaaaacacacacacacacacacacacacacacacacacgcgaacacacgcagctgatgattctactctcccagccccagccctgaaggggacccagaactccctgcacaaaggctgtccttcaaggggagggtgaaagaagtggaaaatcacattttcattctttagcgtctccatacaacagccagaactgggcagaagctaattatatcagaagcatactccatgttgctgcatcagctttgggatgttcatttttaaatttatttatagcttgtctcattcctcaaaggagttcagggagctacaaaaataaagacaataaaattgaaaaaaattaaattaaaaaaaccatgaccagggaaaatgtgcagtagaatgaagtgtcaattatcacgttttctgactgcaaaatctcccccacggctgatgcaccatcatttactacaacagcccctcttgttggacatttccagtttatttcgtttgggatggtttgttgctgttgctgtggttgtggttttgttttattgaattttgtgttagctgcagctaataccatcttgctgatggctttgcgctgctcttgaatgattactcaggataaatttcctggagacggattataggatcagaaggtctgaacttctgtgtggctctagctacaaagcaccagattgctttccaagagcgttgtagcaatttataatccaacactcagcctattttttggctgggagtcaagccccagaatgtgaaggaggggtcttggcctggagcaggggctgagggatgggtgcacaggacccctccttattggttatttatggggatgggccaggaggagcagaatagaggcccctgccctcccagttgctccttggagtgactgaccccataggggaggggcgaggctacctcacatttagaactatgtagttggtgatggtcaaggtcctaggtctgatgggcatcctcctccctctcctcctcagccagtaatggctgcactatgtcgtatgtcctagatctgggtcccttttgctgtgggaacaccaataatacttacgctgtttcctgccggaaacggtgcaggagggctgtggcatggtagtgggccctggaaaccatctagccttcatgaggaagggcagttaaagcacaggcatgtatgatgttggtattgattaaaagcctcacgggcagagaaattcgccatctgccagggccccagccatacgagggctccagccatacatcctccaggagactgggacctctccaattgcaggagccttgccttccccatcagattaggaattccccgaggatggggacaatgtccttcccacctgcttgagaactcctaaggggcatgtactctgtctccccattgtatctggaacttcctgggagcatagctcctgtctccgtcctcagactgggaatcccctaagggcagaggccatgtccttccacccacttgggattccctgaagttggggaccacatctctgatgtacaatgctttgtatgtactgactgctgcaggattcttggagtaaatgggcagtcaacttcttggactggtattgaccatctggacttcatcagagtgtccaagactttgccattcattagacaggggccatgtgcacaggcagagccctggcctctggcttctggctcctgactcctggtccctctgctttaatttggctaatggcagaaccagactcctttctgggctgccctggaaggggatccttgaatgaaagaggatagatgggaaggtggcagctgacatggttacctcttatgccatgggggggctgctctctctggaaatttaggcctggggtcagggcactgttgagcattttacaccctaggccagaggaggggtgacctgtggagcagggctaagctagtagcccatgaggtatgatgtgtaggcagcacctggggctcacagagcctgttacccatgttatctcctctgaccttggaaagagctggggtgtatgaacaagtatttataagtttacaaaaatcatatgaggaaactgaggcacggggaaggtaaatgacatgccctaggttacacagcttataagtagcagggattctgcccttctgtcacaccaagtcccactgtcttttcttcctggagtccctgtgactgatctaaaggccacatgtttaacagaataaggaggaggcctctgttgcagcaaaccagctaccccacccgcacacagactctaagggacatcctgctttaagctgtccttagttactaatacctcagtgagaatgagtttgaaattttctcaagagccatgggagactaggaagtctctaagcttcatagagagcctggcttggggggacacaggagccaaaggcagaggaagaagtggcagctttgtgcccccagaaacacgtgctcctgacctcacagttggccacagccagccaactctcccatccttctcccaccactttcccgtggggctaacttcaccctgtccacacggagtgacttaacagtttaagccccagagtcgggggccggggtacctgggacaagagtcctgagggaaatggggtgaggaactggaagtgccacagggctagagttctgcccctagcctactggagctgtgccccacaggctggccccactggactgcgctgcctccaagccatcctgggcatctccatgtgtagctgtcacgctcctcccactaaacgcctccctgtgcttcctctgcagttttcatgaacacggccatccccattgcagctgtcctcatagtaagtggatcctttctccatctcttgggggtagggtggagggggagggcgtctgcagtgacaggctgcccagatttggcctttctgcacaggggcctcagaagacaggctccacagccagactgaaaataggatcgaaagtttatagagggtgtggcccctccccaactccagccgaacaggggcctctgcctccaggcctggaagaccggaggcttagtatttagagaaattaaactttcttttaaaaaatagctatccaaatttttaatttttaaagtgaaacatgtgtattgtagaagtgatgggaaatccagaacagaaagctcaaagagaattaaaatcacccataatcccactggtaacatttttaatgtgtttctttccagtctttttttaaggcctatgatatgtcattttctacaaaaataggaatgtgctatgcatgcagttttgcaacctgctcttttaaatttaggaatatgccacacacaattctccatgccactgaatattatgatggtggctttctaaagcaattttgataaaagctgtgtgtgagctgagccatgggggtcaagcagcatgctcctacagaaaggcctgggcccctacgagcctgcagccccctcacccagcctcccatccccatcttctgtgatggctgcagttccttaaaaagatctgcttatttcccccggggccagtgtccctgagctgtgtagagttcacagcctgtcggatacacttgggaattcacttccaatgtgatgtattgagctggttcctggcctggctcctgggggaactgtgggtaacagaggccactgagccagccaggtggctggggcaaagcactgtgcagtttcgtaatcactctgtttacgttatcccgatgaggactggggagatgagcaccccgcctgctgtctgcagagggggccgtgctgacctaacccgagatctcctccctgcttattcccagccaagactgggcaggacagggagtcttggccaggacagggagggagcagcccctgctctccagcttgaagtcctgaacttgttggggacgtttccatgagatgactgtggggatgatgaaggtgtctccaactaaaagatcctcttaggagcctgctccctgacagccctctcatttcccttccagtgctgagcgtttccagtgtgggagggacccacaccctgggccaccctggcctcacttgtgcctctgtccacagactttcgtgggccacgtcagcttcttcaaagaggccgacttctcgccctccgtggcctttgcctccctctccctcttccatatcttggtcacaccgctgttcctgctgtccagtgtggtccgatctaccgtcaaagctctagtgaggtgaggggagggtccgggcgagggcactgggcaggcaggtcctgtgtcagcctcaaggcttgctcgagtgatggccaaaccacagctgtttggtcccggaacacacccccattgctgggccttgctgtagctggtcctggttggtcagagggacattggcctgtatggtttcccagctcgccatccctgagcaaggacttgcttacatacctcccaggagaggggactcactgtcactttcacgacaacttaaaaaaaaaaaaaaaccagtgttgagccaaatgtggaatcctcctaaattctacccactggtcctaacttcaccctccagagccaccaagaatgaggccatcccgtccccacgtggctgccccatggatatcagaaggcatccactgtgtctatctttcccaggccaagtatcccctaccctttccacagcccctgagccctcacagcctcagccagtgaaacagcttcccccaagcgctgggtcctgctctgattggcccacagctcttggaggctcccacttccaggctctagagcctcatggggactctgccactgtcccagaggcattgccctcttgggaatgaaagcctgaaggtagaaggctgaggctttggctgggaaatgccctgtctggagtgagaagatgtccttgggcctctgaagtagctctgcctccttgaaagcaagagcctgtcatgcctctatggagggctggcttgtccttacccatggccagagaaccagtcagtaacaaatgtcctctgtgtcttcagccttgaggaaggtgacacccctgtctcatgggaccctggcaggtactgggaagctggaaggaaggagtagctgttggaatgaagtagctgatagagagggtagcttgcagggggagactctagcatgggttcaaagatggaatggggcataactcagcaaaattatgctctaaggagtatctgaccaggcagtagctggttaaacagggattagctcccatttccacagtcggctgtgctgactcagtttcttgaccagggtgttgtggggtctgaagatcacccctcctcccaccacccactctccagccctatgattctgtgtagaaaccacagatttaagaacgctgcacctgcctgaaaactgttgcactgatcccaaagcgttcatattttcaaacactctggatcccactgtttccaggaatggaacaccagagtagcagaggccttttcagtgaggcagctcaggctctggctgaaggtgggcgcaggacactacctgaagcttcaccccaagagatgagggccagctccactcttcccagtcaccgcctgtgggggagggaggctggacagggcatgaaggcagagcctggtggtctgcccctcccatctaggggtggcgcacagaaagggagactccaggccacagctcacttacaccccagaataaccttgccttgagggtgggatggcttgtctgccccaggcctgttggacatttagcaaaagagaagaaaggggaatacaaacaatcctgagcttcccagaaagctttcacacctccaggatgggagagaatgaactagaagagtgaagcttccagtgcttcctcaggtccacagggaaatctggacaggggagagggtaggaatagccgcctcccccgtgagtaatgacacctcctccagcaggctgttatggggatccgattacataatgctacaaaacagttaacacagtgtctggcatttagtgtatgctcacaaaatactagctattgattctttaccaatcctagtcctaactaaccttaaccctgaccaatccaacaccaaccatccttcagtctaataacccagactaactaacttcaacattaaccctaaaactaaccaatctcacctccaatccagaccccagcctattccagctgactggtcaaccctagcaaaccctggtaacaccaattacctgcccccatgcccactggtctgcccccttcagtgtgggctttgtgggactatacttcaggcctgagatcctgctcagagctctctatcaggctgcgccctctcccctcccctctgcccctggcaggggtgaggggtgtctctgtgcttcccgagcagcgtgcaaaagctaagcgagttcctgtccagtgcagagatccgtgaggagcagtgtgccccccatgagcccacacctcagggcccagccagcaagtaccaggcggtggtgagtgcccggcctccccttgctactcccagcatggtcctctaaggcccaaaacttgggcctgctgtgtcggacttctgccttttttcccaggaagaggggctcccttccctacacagctcccagcccagtgggtcctcacctccaaaccacccccagcccctcagggttgtgaaccgcaagcgtccagcccgggaggattgtcggggcctcaccggcccactgcagagcctggtccccagtgcagatggcgatgctgacaactgctgtgtccaggtgagtcctgctgccccatgcctggccacccagcaccaactcccagagggagctcagcacctggaaagccagaaagctgcatgcttagtcctctgcagaggtcaccctgcctgcctgtacggtccataggagtccagaaaccagggaccaccaagtggggggacccccagccttaggcaagggtcagcatgagaaggccagtctcccactcccctgctctggaagtgatccaggggctggaatcagtgtcttttggctttcatggaggaggggaagccagagactattcactgggaactggctgcctttctgttctctcctgggcggtgggacacgcctaatgaagatcatgggaggctacttcacgtggaccccagatggaatccccacactgtccaacatcaccattcgtatcccccgaggtatggcccagtccacccctccagcatgcccctccccatgtcccactgaataacatagagataaaaagacaaagctgcatttattgagcacctactctctgctcattcttggtgtatgccctgggtatattatagaaggggaaggctacattctagaggcttccgtgtgctgggtgggagtgaagcactaaggacagggtaaaattgccagccttaatgtcaaaccatccattgcagacagtataggtaatgcacaaaaagatcagaagtgggtagccaaggaacgcaagtggaagtgatggggtttctgagaatggacaaaggccctgaggccatgaggcaggaggattttctggcagaggcagccatgagcaaagtatggaggtgggttggaggtgggacccaggatggtgtttcttgggaccacaaggagcctgggctcatactaggagcatgggaaaggagaagcgagtgcttaggaagggtggcggggcaggaaatcagagagggggaaggacctggggagccagaggaggatgttgatttccagaaggaaaggattaaagagggagaggacttgctggggattctaggtaggaagaaagaaaacaggggccccagggttgggtgcatctgtctgtctgtctttctgggtaatggttgttcagactcccccggccccactcacatctgccaccctccctccctgcaggccagctgactatgatcgtggggcaggtgggctgcggcaagtcctcgctccttctagccgcactgggggagatgcagaaggtctcaggggctgtcttctggagcaggtaatacatgtatcctcagggcccagtggaggggaaatctccttttaaccatcctcctcagttgaggatgcacacacatttattggagggcccactctgtgttcagtgaggactcaataaatgctgctaatggatattctcatcatcatcactagtacgtattcacctcttactatgcgcaggttctttgctaagtcctttgcatgcattatttcatttaatttttatgataactaacaaggtccatactgttctcaattctcatttatagaggaaggttaaactatttgtcctaattcacacagctaataagtggcagagctggaattgaaactcagttctgtcagactctgaatcccatggttactcagatgcacggcagtaatttcccagtgtgggaaattgcaacaccaacattggtttccagcttggtcctgagctgcactgacctacacaccataagtgggtgttctgaagatccagatgtaaccaataaatgttggtttctgggcaaagatcactgtcttaattaaagagccagaaccccaggctcagtcaatcacgaatctgttatttatacccacctacttccaagaagcacttgaaactagttgatgaaagattcatgtaaaaatcaaaaccacaatgagataccatctcacacccgttagaatggtgatcgttaaaaagtcaggaaacaacaaatgctggagaggatgtggagaaataggaacgcttttacactgttggtgggagtgtaaattagttcaaccattgtggaagacagtgcggtgattcctcaaggatctagaaccagaaataccatttgacccagcaattccattactgggtatatacccaaaggattataaatcattctactataaagacacatgcagacgtatgtttattgcagcactattcacaatagcaaagacttggaaacaacccaaatgcccatcaatgatagactggataaagaaaatgtggcacatatacaccatggaatactatgcagacataaaaaaggttgagttcgtgtcctttgcagggacatggatgaagctggaaactatcattctcagcaaactcacacaggaacagaaaagcaaataccacatgttctcactcataagtgggagttgaacaatgagaacacatggacacagggaggggaacatcacacactggggcctgtctgggggtggggggcaaggggagggatagcattaggagaaatacttaatgtagatgaagggttgatgggtgcagcaaaccaccatggcatgtgtatacctatgtaacaaacctgcacgttctgcacgtatatcccagaacttgaagtataataaaaaaagatgcatgtaaaataaaaccctttaaaaaggtaagaaaataggaactgagaaatgaagagggtaaaaagatgttcagcaacctgggcagaggacaactacagccatcaacataaaacctggctctgtgccctctggtagccaagggaaaaagggatctctgggctttggagtattcatttaggaataaaagttgcagccaatcagcagaagggcaagctttccctaccaatcatttctaggggaaaattattgaaggtgtcaggtttttcataagcatgagtacagaactgagcagggagaaagactttgggcccaatgtctgaatatcaacatgcacccccgtttcctgcatttccaagatgtccctgaatggtgtatccaaaagatggcaaatttccctcctcagtggggtcgtgggctagcagatgagccccttgggtttcccatcacctcccatcagggactgtgatgtctttgggggcagaggggtctttgcctccattcgccattttatttgggagatttttcaacatagcctgactgggaaggcccaggtattcggtttgagatcatattgccttattccgactgcctctccagcctttggagggaggagcccttttctgctgtccaactgcatgcctgcagcaagaagacaagagtccccagtgcactgtgagctgaagaaagtaaccaatatttattgggtacctcctatgggccatgccctttgctaagtgcattgtcaacatgatctcatcaagcctcctactaagtttaggaggggagtgttgttaccccatttcacagaagcagaaactcaggctcagagaagttgggtgacttactagtcagtgtgtggagcagagactctgcccatgttctttccctcaaacctggtcactgctggggcccccagggcctagtcctaagggttattgtccaagccccatgtagtggtcaggctggatctgggctctcctccaaggcagggcttttccagaaggattgcagggctcagacactggagctgcccctgccttgacctgctcagcatggatgtcaaaacccactctgaacctggtccctttgccctgctttcttctcctcccccaccctcatgccctcatgtggcatcgtgcctgcctcaggagctctccttgtcctatgtagatgaagcaggcatgattggcaggggtctgctctgccctgcctcagtccccacctcttctccaagctgtgccaaccctccgggtctgactgctgcccctctctcttaggaaacctctgccccagcccagggaacacaaggagcctctccaaggcagaggaccctaagcacttcttttttttattattttttattttattttaggttctgagatacatgtgcagagtgtgcaggtttgttacatagctatacatgtgccatggtgctttgctgcacctatcaacctgtcatctttttaagccccacatgtattaggtatttgtcctaatgctctccctcctcttgcctcccaccccccgacaggctcggtatgtgatgttcccctccctgtgtccacgtgttctcattgttcaactcccacttatagtgagcacatgtggtggttggttttctgttcctgcctaagcacttattataggccaggcactgtgcaggcacctcatcatctcagtcagtctgcaccgaactctgtgcagtagatattattatatcctcatttatcagattaggaaactgaggtgaagcaagttgtccaaggccacccagctgttaaatggcagaagtgggatttgcacctaggtgctcaagtgcattggtttgccaccatgtgctcaaagagaaggggcacaagagcctcatgaagaaggcatagctagcctgacagtccaaaggccagcagccgctgtggccatgactcacacacacctgcctcctcccagaactgccacgtgggtcctcacagctctgtccttatcaacacttactctcctttacaggtagcctaggccccagctcccagctctgttcgaggctcgcagaggggcggtagtgaaggggtctcatttctccaggatcctctttgctctctcgcccggtcctggtccagcttccctttcaagcatagtgaagtgcatttgttagcttgcagccaaccctgggaaatcatgagaatttgttcccaagtcaactcattctccagcgtccacagtgacgtattcactcacccagttgagcgcctagtgtatactagaccctgtgacagcaacaggagtgcaaaggtgactaagacgtggcccctgctttttttttttttttttttttttgagacggagtctcgccctgttgcccaggctggagtgcagtggtgcgatctcagctcctcacaagctctgcctcctaggttcaagcgattctcctgcttcagcctcccaagtagctgggactacaggtgtacaccaccatgccggctaattttttgtatttttagtagagacggggtttcactatgttggccagggtaatctcgaactcctgacctcatgatccgcccgcctcagcctcccaaagtgctgggattacaggcatgagccaccacccctggccggccccgcttttaagagaggggagagaagacctgggccttagaagagctcagaggaaccacaattgactctgcagtcaaggagaggaggctcactgcggatgtggtatttgagccttgaaggatgagtgtggtttcatcaagtagaaaaggcagggatgggaaagggaggtggtccaggcaggggtgatggtgtgggcaaagccttgctgatattaaagaacatagttctgtgcacctggaacactggatgcatggggtgcattatgaaagatgggactgaagaagtgaacttggcttagatcccatgtagtaggtctgagaagtaagatttaacccaaaggttgcaaaagaaccatgcttgtgataaaggatgatggattggggaaacagagaaaaagacagacagactgtaggaagggaggtattagcaaataatcataacacagtgtgaggtgtgcattaatattcactcattccaagtattgatcaagaagagaggtaggtactgggttaggaaacagcttgggcaaatgcatggggaaatgagagatgtcaagatgcattctaatggcagcctcttgaagatcttaagttgtttttggttcactcatttcgcaaatgaattcatttagcaaaagcactatggatacagtgcttacctctaggaagtaagttttagcccaaatgctgcagaaggatcatgcttatgacaaaggatgatggactggggagagagaaaaagaaaagacagacagactccaggaaggaaggtcagtctgcagctccttatagtggctaggagaaggagtctaggcagatacgactcaattagcttcatctgctgtttgtctctcaaaatctagacatgtgcactgctctggctggcccacctatcctgggcattgagttaagtgtgggggctgtgtgttgagagtccccctccattactggcaggaactccacacctcagacattgagccccaggtctgcagggagaagacgtgcttgcaaagtgagctaaaagcaaaacagcctctgacctggcaagcattcccaagtctgcacgcctgcagccagaggagagggtgatgccaggctgctgctcagatgcttttcagccatacccaggccaagacctggtgaccaggcagccagaaggagttccaggaggcacaaggcaggaagttgggggattaggaggtgtagaatggagaatgctctggggagatgggtgctttgttggtgcaactattcgtttattcctccagtgaccacgtgagcagtatggctgcacacacaggctctgcagccaagctgcctgggttcacatttggtctctgtgctttggaaaatttcataagctttctctaccagtttcccttattacccatgagattgatgtgaggattaacctagcatgtagtaaatatcctataaatattattattcaatagtgtacttctttgccaggaacaaaattcacctgttcctctttaaatgtcctccagtctgtctcctgggaaagattcttgtgagctccctggggacagggaccatattttgtttgtctcactgtatccgtagtgctttttgctaaacgaattcacttgctaaatgaatgaaccaggaacaacttaagaccttcaagaggctgccattataatgcatcttgacatctctctcctttccacatgcctttgtccgagctgtttcctaacccagtatttcactacccctcttctccatcaatatttggaatgagcaaataccgttagtgcatacctcacatggtattataattatttgctaatgcgtctgtctcctccatgactctgagctccttgagggattattccatgttgtaccccaggtgccccatgcagatgtgtattttgtgcactgttctgtgtaggctacaaaggaaaaggcctagcacctgcccttggggagctcacccacccaggatggacagaggtgtgcagacagagctgcagggtgggcacaaagggtccatctgctgaagtcctgcagatgcagccccgagcttgtccctcacgtcagcagcctggctcctggtctcagagagaactgtgtggttcccaagcattcactttaggaagaatcacttgcccctccctggctctctgcttcaaggaactgtgacaaccttgggatttgcaaactctctctttaatccttaagaggaaaatgttttggtaaaaagtcaagattagcagatacactcgggtgaaattctttccctggaaataaagaatagagccattaatatccacagtagagtgactttaaatgcccccggggggtcagcaggaaccagggccctgaggaaaggatcagcgtggggaagaggctcccacttccctgtgaggagctgcacatgcagtctcactggagctccctgctgcaatgctgttgcctgtggtggttggtgtggatgctgcctgccaagagccctgattccccaggaagagagaaaaaggcttctctcaggacggccctggtcgcatctgcctgtacaattcctggagcctttggggagctgaagtcaggggctcaagtgcccctgggtttcctggaggaggcaggtgtggtgagacagctgacagacaggagaagggatgctctgaggaagtgactgtccagccatgggaaccagatggcccctggctgtagtcctgatgctgccacttgctagctctgtgaccttgagcaggttacttcacctctctgagacagactcactgtctggacaatgagtaaaaccctacctttcctgtctcagagatttggcaatgggacccaatgacatcaattggaaaggatgctgtgggtgaaaggtaacctttcaggacagcgacaagcctgtctgggcaggatgaatgggctgtggagccctgtatatcctagctcactctttgaacctcagtttccacttcttccctttttatttattgccggggtcttaaatgagtgttgggggtatctgattctccctctgcctgtacttttggggccaagcactgagctgaaaagacaattcctcctagttctccaagcctacaacctgccccctaaccagctgtgagctgtaatacattctccagtgtcactgtgaggtttgtgccttcacccccattttatagatcaggaaacagaggctcctccaagtaaaggagcttgcctcagatttcacagccaatgagtggaaaagcctctgggattcaaatgtcagagcccatatttttcctacttctcgcacctgttatcatatgctgcctcttcctttaacctgcagttccctcccttcacctccaccgtctcaatccttcccactctttaaggttcagttcagctatgacttcttctatgaggctctactcattttctcagatttcttcctcctccaaatttcttgtaaaaattatgttttttctctgattctaaaagaatgcacattacattagaaaagatacacaagcatacagaagataaaaaccacctaatatcccatcacccagaagcttccagtttttctttatgcatttgcatatgcatttgtgtttacttttccccaaaagttctccgatactttgtcctacttttcttttgacccttataacttcctgacttcggtacctttctgatttgccctaccagagtgtgagcccctggaaggcagcctctgcaccctgattcaggttgccacacatatgccagctcctagtgggctggagggaaggacatgcggttggggaactggaagactcatgctttcagctgtgtgcttcctccctagagtgcaggcagaggaggaatcgaatcccctcagcactcttgtaaagaccacagcaatgagtgagagatggtgcctgccagacataccattctttacttttcagcttaaaacagatacaaagtttggggaggctcactggaggaggcttggggctacactggaaagagaagaacttggattcacaccccagcttcccctcttcccagctctgtcacatttgcaaactctgagtctcagtatcctcatgtgtaaaatggggatagggtttatagggttgtaaggatgagatgatgagttgtttgcaaacaacttctcacagtgcacagtgaaggtcagcaatgagagccagccccgccctttcttctttccaaatgattaatatatctgttaccagcctccattcattatatagctctgtcatgtgctaagcaccatgggggctgaaaaagatgttcttcctgccttaaaattccactggggatgaacaaattacacgggagctgatcagagaggaaggcagtccattatgagggctaattgagcagtgcagaccatgttgcaaactgagttagggcctggagagcttactgtgtgctggggtcctcaggaatgccacagatgcatcaataaccacctctgctactctggaagtagtcacatcaggaagactccagagataagcttatctgggctgtggccacagagctggaatttgtaagctttaggtttctatgtctcatgttaccagcttgtctataaattgtaaattacagccatctgatggttagggaatatgaagtttggttaagagaatgaaatgagaccacgaagattagagaacaggaaaagaggggactggggactacatacccatcagaatcttcattcagtcctgaccctcagcaggagggggatttcatcaggctcatttccatccttgatttcgtccatcctggttctcctgacaaggggcatttatcagagttatggcatgggaaatcacaggggagtaatgtaccatggcatttaagagtatgaacgttggagtcggagctattttctccgctacttactagctgtgtgactttgggcaagttacttagcctttctctgagcctcactttctttatctgtaaagtgagggcgatcagaataaacctccttcatatggttattttgagctttataaagagacaatactggctgagcacggtggctcactgccagtaatcccagcactttaggaggccaaagctggaggatcgcttgagcccaggagttggagaccagcctgggcaacatagggaatgagactcctgtctctacaaaaaatatacaaaaattagtcaggcatggtggtacgtgcctgtaatcccatctactcaggaggctaaggcaggaggatcgcttgagcccaggaggtggaggttgcagtgagccaagatcacgccattgtactccagcctgggcaacaggagtgaaaccctgtctgagagagagagagagagagaaaatactactatggtgcttataaaagttcaataaattttagctgttgttagtattattaaagtaagatctgtatgaaaataaagcagattttttcccccaaatgttcatgtcagaagtatatatttcattggcaaggggctgcttctggaaggttgagaggtatcctgggggaggggatagagcactggcaaaattggcatcacaattcaagtcacctcactcagtgttttttaagttatcaaaatccacagtatgaaaagcatttgacattacagtccactatatttatgcatttataaacaagagaaaaaatcacgaaaaatacagtaccacgtgcagtacacactgattccatctattctttttttttctttttcctcaaatgcacttgccgcctacttattccagacccaatgattgggtccctatccacagtttggaaaacactataagaaatgattgtgtcctctcactttccctctctgggatttagttttccaactataaaatgctcctgatgcccagccagcctcaccgctgctccgagtcaatgccaggaacgctgatttagcacatgctatttggagggtacccatccaggtgctgtgggagggacagagattgagaagagtgctttctgaccccacagaggccatttggaaaccctgggaatgggtgggagggttggaggtggggattgcttctcccctaagactcagcgtgatggaaaggcaatggggtgggaactaactggtgttggtctgtcccatttgtgtcccagcagccttcctgacagcgagataggagaggaccccaggtacagccttgggactgggtcagaagtgggtctcaacaaagggaaggggtagggtgggggtggaggacttgtgggtgggtaatgctgagtatggattcagggatgtgcagcctacatattttcagagacatggggctaaggcctgcattctcaatgagggcaaaatttggttcttggggacagaaaacacttagacattgcaatgctttgtggctgtccaaagtaccaaacagatgccagtatatctgtggtgctgaaatttcatggtgaatggagtcagaaaatagactagcgattgccagggtctggtgggagagagagggaagggactgccaatgtgtatgggatttgttttggggaagataaaaatgttttggaattagatagtggagatagttgcacaacctggtgaacgtacttttagtttcagaggttttctaaacctctgatttttttttaagtgacaggaaagacagaaaaaagtatatctaaaaaggctctaggggtgatcatggaaaagaaagttaagaaatatgactgtaaggaaaggagatgggtgtccctcaggccaggcagaaaattcagtcttgttgctttatgttcatgtgcaaatctaaaaaatccaagtgatatagattaatgaggctctgagtccctcaaaaccttccctccccttacctctccaaaaaacacttgagataccctagaggtggtatgaagtcaggatgggaaggttggctcagctttgcaaataagtttaagcctctggcctttgctctccaacaccaaagaggcttcactttggtatattttctctgccctttctccctccttgtccccaactgtcagtatgtgatgacaggctcagcctctgtaatggtagtgatcatatttcttgagccaaaaatcagacctcatggcatgtgacaagtttgcatatgtggatgagaacagagtggcagaatatttgacacgggagcagcttgggcagtccagggcacatggcactgcacctgacatccctggcagatcccccacattccgtggttgtcttctgatggggccatatggggctgcagatcatgcctggagccctcgcagctccagggctgcgggttcccagccccagagtgcaggtgctggtgtcagcctgcctggcctggcctggctctgtccagagcactccttgccccagctgtttgtgcagctgtatcagcctcagacctcagcctattcattccaacctgaatgcagaggctgggtctggaggagccacattgcgggcttcatactcctgatctgacaagttttccccccagagcctgcaccaatggcacctctccccattctccctcttaactgggtcctccagggccctcctcacacacccacgtggtcaggcagcagaggcttccccaagatgggcacaccccactctccacacctctctatgcagcatttgtggctacagactgggtccaggggattgtaaaggcatgctcatgttgggttggagggagctcaggatcttcctggaggatatggttcactcccatgagagctcagtatgcctttcctcccctgctgcagcccagagcgggagacagcgaccgacttggatatcaggtactgcgtcctgggaacattgccccccagggtcaactccctccagggtgctctcaggcccaagggagccacatcaccctgctgggcagcccccagaccccagccccagtgttgggggaggccagggagggcccctgtgctccaccaggtggctcgggagctgctgctgtttctgtgcatccatttactcccttcacataagatcatttttatctgggatctctttttcttttttcttcaaaaaccacatcactcaaaatgtggcttccttggctctgcttttaaaaaaaaaaaaaaaagttcttccatttggagaattacctgctgacttcaaagtccagtggcttgagggctacccaaagagggaggaagccagaagttgagtgttcccttggtttggtcacacttttgggctcctccctgactaaggaacaacagactgcagggctggggcaggctgggtgtagggcagggaggggatgaggtcctgctgccccagtcagttgagacccagacctctcaaacctgcctgggggaaggcaaggccaccagaggccacactaagcagatttctaccaactgcacctccccatccccttgcctccatctgagccatcagcttgacaactgcctctgagaacaagcccctgagaatgccttccgcaccccctactcccgccctgctttttccaggaagagaggccccgtggcctatgcttcgcagaaaccatggctgctaaatgccactgtggaggagaacatcatctttgagagtcccttcaacaaacaacggtaaaagcctgtcggagggaggcaggatgtggaggggaggaactgtctctggccagcctgccccagttccgggcccctccatcgatcacccacacccagccatctcactccccaggtgcttacctgcactccagcctctccatatggtgcacctggagaggggccaggtgtgcctgagcattggggcaatccagctcccataggggagagggcaggaatggagggaagggagagagccccgctgccttttctctagctggtgggagggctagctagctctctctgtgagtctccattcgcctggctcctgcactattttccctccaatgataatagttagggctagcatcgactgcgctcttactacataccaggcacagtgccgagctctttgtacacggaatttcctctcatgcttacaacaacctcagtaggtagatattattgttattcccactctacagatgaagaaccaagtttcagaaaggtcccaaggccacccagccagtaagtgaccaagatgggtctcaaatccaaagctgcctaacacctaagtacatgtttgtcaccaacatactctgatgcctccatgaactctggctggcacctgcccaggctaagggctggctggggaagtatgagaggaacaggctgggcaaatatttgaccagccatcatcattactgcctaaaccaaccagcagtggttttccctgcagtgccccaagcacgggttccggctgcagcttttcccactgcacagagatcatgagcgccctttcatcacttactctgcatatttgttcccaaccaattccatccttctagtatttaacctgcccaaacgctgtgtgaagtgctgacctcagctcttttcaagctcacacggtgtttgcttgcacccaagcgggaggcctattaaagccattgctcaccctgggcatagctacccagagactaatgaccctctgcaagtgctcgggccaactctgaccaggctgaccagctgcatcccctgcctctacccacgccaggtacaagatggtcattgaagcctgctctctgcagccagacatcgacatcctgccccatggagaccagacccagattggggaacgggttagtagcagcctctgaggggttttttcaaagccaggacccccaacctaccatgccctgagacactactcaggacaatgggtaactaggaaataggagacattgaaggctgaagagttgcctgcagtaaggtcaaacatgttgttcttgatgatgtcctttgacaggttttcagtcctgcttggagggcaaggtcagcttagtgccctcccaggctggggatcttcttcatttgcaccccaggtatacactgagagcccacacagcactgtgctcagcctggggttgtattgttcctgttcatcctccagatggggtcccctccacaagcttagacgaacaggattctcctgtgactgtcctccttttgtgtgattttaatccctgctgcctctgtctttgtttgtactggtcagatggtccctagcgcctacacaatgaatctttaaagacttggggctcatgctgccctcttctgaatgaattcagtaaacacgtgcaagttccttctctatgcaaggtgagaagcaggcaaagaagtggatagagccaggcctccatcccaaagagctcatagtccagtagggtacaggacagtgtctcctgaatggctgagggcatgatgtgttcctcctctttggtgacagggcatcaacctgtctggtggtcaacgccagcgaatcagtgtggcccgagccctctaccagcacgccaacgttgtcttcttggtgagtgcaagttcccttggggtcctggtctctggctgcctcccaggcctaactgcccacctccacctccccgcaaccccaccatcatccaacaatctccctctccaggagtaaatccctcctgccagagatattgccttatcatcctagtgatagggaaactgaggcaggcaaggatagcacaaatgacccattgcagacttcagatggagctctgcagtagccaatgaggagaggcaagctgtagttataggctgcctgtctgtgggacagcccaacccctcaacacttatgcagcccgactataagaatggctgataacagaatgtgtgctgccacttcccatcttatgcccagtgcagacattgctaattgttcacagcattatttcccatggaacttaactcatcctcagaatccttctcaacacagcactccaggtaaccactagccatcaaacatgagataaaactaggccaggcgcggtggctcacgcctgttattccagcactttgggaggccgaggcaggcggatcacgaggtcgggagatcgagaccatcctggccaacacggtgaaaccccgtctctactaaaaatacaaaaaattagctgggtgcggtggcgggcgcctgtagtcccagctactccggaggctgaggcaggagaatggcgtgaacccgggaggcggagcttgcagcgagccgagatcgcaccactgcactccagcctggggacaaaccgagactttgtctcaaaaaaaaaaaaaaaaaaaagaacgtattcgcaatccttacactacttcatgtcaagttctgttgtgtcaggtgccttgactgacactgaagaattctaagaaccagtccttggcctcaaagatttagaatctgattagggagacagagctcacccagttcaagaggcccagcccggttcaaatccaaactgtgcggcataaactatgagggggccttgtccagggagacaactgtgagggctggagtaatcagggagggcttcctggaggagagcctcaaagggagagtcaattaaacagaaggaaagagggaggccatttgcacagtgagttggaagaaggaagctcaagtctctgattccagctttattccctcccctctccctacaccacacgcacaagcactcctttactaaagacacttcacagtgggaagattcagtctccgttaccgtctgacacacacacagcgttttacaaagcatgggtgcattcgcgatctctcatgagatttaaacaaccctgctagagaaaagtgaagtggacattttatttcagtaaacgtttatgaagcgtctactctgtgccaggcactaaacgtttatgaagcgtctactctgtgccaggcacaggcacaagaagtctcagttcttgggagtgccataatcaggaatggacaaacaatgatcagatctggctttgcgccagtgtcacgggaatagggaggaaggaagggtaggcgtgggggtcaggacaggatgcaggaggaactggtgcttaggtgagcgaaggatgggtgggagttcacaaggcagacaaaaggcagagcagcactccaggcagaggaacagctcaggagaaggcccagacggcaggcttcctgggaacctggaatgcagagtgctgggaaagcacagatgaagcatgagtctagaagggaaagcgagaggttataaagcacctggaacaccagcccacagggtttgactttagagatgatggggagccgttgaaggtccaggagtcaggcagtgaagtgattagatctgtttgagagtgatatctgacaactgccccattttaaatgaggtaaccaaggcccagagaggttgggtgagttgtccaaagccacacagctaactagcttcagtccctagagcagagttgatagaactctaatgggttttatactcattgtcacccctccccaccatgcctttccctaccctctactctcttcctctcccttctgcccaggatgaccccttctcagctctggatatccatctgagtgaccacttaatgcaggccggcatccttgagctgctccgggacgacaagaggacagtggtcttagtgacccacaagctacagtacctgccccatgcagactgggtgagggggaacaagggggtcaggctatagggggcagggctggggaggctgtcaggcatcttggcaggaaccaatccgttgtcttggtagcaactgctgagggccacaaagcataagagaccagcactggatggctttatgcatgctgggcatttcagggagaccctgtacaggccaggggtttggtatcacctagacccacagacactccccatcctggcccgggccccccatggtacactcaaggctggcaccaagaagtctcaggaataatcaagtgctcacttctcaccttctgattcctgcccttttgatgacccatccccgcagtcatggggagtgcccatttggatggaaaagccctcttcccaccctatgaccttcccggggtggatggatgcaccaccccgggaatcatatgggaaatatggaaccaaacaatagcagtagtaatagaaacttcaggctgggcgcaggggctcacacctgtaatcccagcactttgggaggccaggacaagaggatcacttgagcccagaagtttaaggctgctgtgaaccatgatcatgccactgcactccactacagcctgggcgacagagccttgtctctgaaaatttgaaaaaggaaagaaagaaagaaagaaacttcaatattatcagtagagtccaatgttgtgaaacccctcattaactaaatttccatactcttcagtaggtagaaaataattactttttgattcattagaaagcacttaatttttaagatggagatcatgtaattttgaactctaggtcttgcctactcctatataaattctcctctaaacaacagccaaaattgaggccctctttgagcttcaggctggtgccaaatggctctgcttattttccccaaaataaatcttccttccatgtatgatgagaccccctccagtataaagaagacccaaagaaaatcacccaaagaaaaaaggcccaaagataagacccaaagacctaaagatttaaatatatatacagatacagaaggtttgtttctgagtttctgtagtgaccttggcaataccttgtagttcaggacaatcctgaggaacacagaagtgctggcttccttgaggaatcagtgatcaggactctcgagccccttgaaccccagcatagggcgggagggggtgagggcagcaggggtgggtgtctgaattaatgtcaggtctacgtgatggtgtcatcaagtgttccagataaaaagttttattgagccgggcgcggtggctaatgcctgtaatcccagcaccttgggaggccaaggcgggtggattgcttgagcccaggagttcgagaccagcttggggcaacatggtgaaaccctatctctataaaaaaaaaaaaaaaaattagccaggtatggtggcgtgcacctgtggtcccagctactcaggaggctgaggcaggaggatggcttgagccaggaagcagagattgcagtgagctgagatggtgccattgcaccccagcctaggcaacagagtgagaccctgtctcaaaaaaaaaaaaaaaaaaagatttattgattccaaagaggcatggccacacacacttagaccagcaggtgctttgctaagccctgatggaggctgccagacccgccgtcaagaggagctaagggtagtgtacaatgagcccacttagtgtatgacggccgctgccgtgggtggagtccttgtgagtaaccagccagcttgagcaggatgcactaatttgctctgcaaacccagccattgagaaatacgcctcagatgtaccgaactctaggtcctaggagtatgttggttggggtaggttatcaataccagcccacttgcagtggatgagctggtggccatttgtagtgaggaaagggatgtgtcaacctccatcttagactccacaattgagggatgtgaccaccattcctccccagccagcccccaaaccacgtttgttgctgcctttccagatcattgccatgaaggatggcaccatccagagggagggtaccctcaaggacttccagaggtctgaatgccagctctttgagcactggaagaccctcatgaaccgacaggaccaagagctggagaaggtgggtatatccagggatggccaagcagccacccctggatgcaaaggttctgctagaacctgaactcataaaggtcttcctgtccttagtgccccaggaagccccctaaagggcagatgtgggagctgggcatgaactggctcctaccagaggagagacagtacctgtgccaggtgcccagggcagaatcaggtgggcaccttcgccttatcctgaggtagtcagatactatttagttgcaaagtttcagaaaatcaactcaaactggcaaagaaaactaagcaaagaaaacaagagggaattaaggatttattgacccatgaaaccaaaaagtccaggtgtgtcatagctttaagtgtgctggatccaggtagtcagtgtaatcagaaatctgtttctcccatctcttgactctgctcccctcaaattggctcagctcccctcaaattggctccattctcatggtatcagtgagggccaccagcagtcttaggtttacattctcccagctcaacaactctgccagaaaaaaagtgcctctttccccatagttcagcaaaagtcccagggctgagtctcactggtccagtttggtcatgtgcccacccctgaacaaatcactgtggccagcggtgtggaatgtgaggattggcctgtcctgggtcacgtgccactttgggagccagatccacctgaatcacagagactaaaaacaggggaagagtggttccccacagggatatgggggtgctattatctgatgaaggggaaggactaaatcctggcaagatgaatgtgtgtctgtctgcccctccctcaggcagggacaaagtagaaatctgacattggtcatcaccagagtagttaccccttaacttccccttcccccaccaaccatatatcctgaagacattgcccaggccacatctgtcttttaggagactgtcacagagagaaaagccacagagccaccccagggcctatctcgtgccatgtcctcgagggatggccttctgcaggatgaggaagaggaggaaggtacaggcaatgggactgggagtgaaattatggcctgaggtctgatcagccacagagaggctaaggtttggggttctgggtgtggtgcagtagtgtgcctttgattaaatggcttccctctgtgtgcccccgttgtcccctcagtaagtggggataaaatgccctgattcaccctcagagggatggaaatgtgtagccacagagtgggttcttgcggcctgcagaggaggcagctgagagcgaggaggatgacaacctgtcgtccatgctgcaccagcgtgctgagatcccatggcgagcctgcgccaagtacctgtcctccgccggcatcctgctcctgtcgttgctggtcttctcacagctgctcaagcacatggtcctggtggccatcgactactggctggccaagtggaccgacagcgccctgaccctgacccctgcagccaggaactgctccctcagccaggtgtgactggcggcccatggcagaggttgggagtggggatgggggaagggctgagcccatgggcaccctggaactccaaatcactctctgcctgtgaaggagtgcaccctcgaccagactgtctatgccatggtgttcacggtgctctgcagcctgggcattgtgctgtgcctcgtcacgtctgtcactgtggagtggacagggctgaaggtggccaagagactgcaccgcagcctgctaaaccggatcatcctagcccccatgaggtacccgtctcccctggccaggctgggactgtgagcaagtcactgttctctgagccttagtcttcccatctataaaatggggatatacaacctgtcacaagcttgtgggggtgactcaaggagacagtgtgtgtaaaagtgccctccttgtgcaagaagcagggagaaactggcatttactcagccagatactgtgataggcattgtgtgtggttagctcatttaattgttaccatggccctttaaagtgagcgtctgcacatccaagtaaagattgttttctcctccctaagtgggtgtaatttgcccatccccacccatgagttcagctccctgccctcccctcactctctctccctcagccagcctcaggttttgacactgggggaacaggtagctgttctattaataatttcctgtaatgggatggataaaaatctcaaaggccacttgatgtcaaagaggtttaaagttgtccctgcccaattggttggccaacttggcttaaaaacacaacaggcaaacagattttctggccccttgtcgaggctagacctcacaatctaactgcactttttactttccagcctcatgagttttctgtggcccacagatatggcctccaagtttatttacttttactctctatttgccccagctctgtagttctgaaactccctggttggggttgggctgactctgggtcagccagccggcaggctgtccccagggccctgttcctcttggcaggttgtccctctggagaggactctgtgtcccaggaggacagctgctgagtcaggccgagccggcagctgagaaaggcggcagtcgtcagatgggcttgagaaactgaaaggctaacgaaaggccagcgcccctttgggcagctgcaggaattcacggggatacaggccagatgtctacaaattggcagaggatgccagacccatgaatgactccagagacacttacatgaaataattaactatctcattcagtaaacaggaagtaaatcaatggacaaatgagtaactcttcctctggctgcctcttaggttttttgagaccacgccccttgggagcatcctgaacagattttcatctgactgtaacaccatcgaccaggtacagaggaccgtgccacactatccccccttccagagacacctcggacccctgggggcttctcctgtctgaggctgggttccccagatcaggtgatcacagccctctgggaagaagccagtgtccccgatccgattataatgctgcttcagggctggggcctccctcgtgggagcctcacagtaaggctgagggaaaccagatccctttagcttccacctgagatcccactggctttctctagtaaagttccagcatattctgaaccaaggtggctgattgtatggagaatattcattttgattcagcctgtgttctttatttaccattgtaccagatggtgtgaaaacaaaatcttgattcctacctcagggagtttaccttgtagctggagagatgagatacgtgcctataataaagggagagcaaggccgggctcagtggctcactcctgtaaccccagcactttgggaggcggaggcaggcggatcacttgaggccaggtgttcaagaccagcctgatggccaacatgatgaaaccccttctctattaaaaatacaaaaattagccaggtgtggtggcaggtgcctgtaatcccaactacttgggaagctgaggcaggagaatcatttgaacccaaggggcagaggctgccgtgaaccgagattacgctgctgcactcaagtctgggcaacagtgagactcagtctcaaaaaaataaaggatcaaaaaataaagtgagagcaaaacatggcggccagtagcactctaaacacagtcaataccaaaattcacctcactctctccccctcgtctccctcagcacatcccatccacgctggagtgcctgagccgctccaccctgctctgtgtctcagccctggccgtcatctcctatgtcacacctgtgttcctcgtggccctcttgcccctggccatcgtgtgctacttcatccagaagtacttccgggtggcgtccaggtgatggcctcaggggtgaggggtgggaggtgctttgcaatgtgcagtttggtgtacttgctagactcatcgttatgagagtaatagggtcgtgttccctccaaaaaataaaaacaaaaaacagaaatgaaggaaatagaaatatccacatcttattccaccgccctaatataatagtctgccaacacacgcacacactgaggttgacatctgaattatttccttgggcgatatggtcaggactggaattgctaggtcatgataaatgcacattttatgcccttcattcattttgccaacatgcttcccaggagggttgcatcattctagtggtcaggctgattgctgatgcatgaaatcggcgggcacctgattcaagcagtgttatgataacacctcccagcccacgtgagtccagagtgtagctgtaagccttgacttgagggagcctctcacagccattctcatggatcacatttgccctcatgagctttggatccatgcacgcctctttcctcctcaaaattttctaagaatgttctctagggagttctttctgggagtgattctcccagattcatagaaactcatagattcaaaaaattgtaggaaaaaatttaaagaacgtctaggccagtgtttctcaaactgccaattacagcccatcagtgggtcatgaaatcaatatcatggatcacaaccagcatttttttaaaaatgaaaaaaacatcagactgtattcatagagtaaagcaagctttgcttcatgaaacctttgtgttggtcatggaggtgtgtgagtactgatttgtgagataaaatatatttctgactgcaggttgtggtcagaaaggttaagtacctttcccaagtgcacatagttggctagaaactagagttgagatacttattagcaataataaaatttagatgcattttggacacaattacctgccccaaaggatcaacatttgtataaatggctttttgcttggatgatccagaatggcccgacacccacacgaacaacatagctttttgacactcaaaaaattcaaagtgctgcacaagctgttctacaaagttcatttcttctgccagagaaacagcccagtctctgtggcacccagtctgaccctggagatggtttatcagggaaatcaacttcctgcatcccaaactggcctccctggcactgatgtgcttgtcgaggtgcagctttggggagcaggaggcaattctgttgccatggaaacctctggccttaccccgagacgaaacctatcatttcagcacatcactggccagggtctaaagagctccttgatggggtaagcggaagacggggttgaacgctttgagtttggtcttctgttcctttggccagctgtctcaaggttcagattgttcacctgtaaaatggaactagcactgcctgcccagccttagctcagctccaggctgtgcagcagaagtacagggacagatggcgacctggggttgacaatgcccaggacagcagtaattgtgccccacatcaggctgtgtctaagcattgtacataaacgatctcattcagtgctcacaaaagctcaatgggctggtggcattgtcttcccccttcacggggtaagaagctgaggcctagagaggtaaggccattcacccacacagcggtagcaggtggagctaggcttcaggcccaggccgagccctgagcctgccctcttaactgttccactctgttccccgccacagggacctgcagcagctggatgacaccacccagcttccacttctctcacactttgccgaaaccgtagaaggactcaccaccatccgggccttcaggtacgagtccacattcccccaaggtaggagtggaacaggggtggggccagggggcacaggccatgagatttgattctcaggactccacttgggaaggccaaggacacgttctctctcaagctgcctcaggtcccaaggcccaagggatatccaccagcagggacaggccaggtgggctcccactgaatgttctagagaggaaaattccagctctgtagacaagcccaggacctctgtgaggcagagcatgaaaagagacaaagctgggacaagtcttcatgtatcaacgctagaaagggccttaggtgcgggccaccctaagcccttcttttattaaggagcccctgtgtgccaaacactatgctgagtactgtacaggccaatcccactcattctgcactgcaaccctcggtgctgagaatggtcatttccattgcacagacaaggaaactgaggcacagagacgttctataacctctctgtgtaaggtgccacaaagcccagacttgaacctatttgttcatgcaacaaacatttactaagccccgactatgtgctaagccccatgccaggcactaaaaagatgagtcaaataagccgctgccctgcaggcgtttacagcccagactttgagcaggccaggataaatccacgtgacaagtattctgaaaaaagcggattcaagggctgtgggagcatagaagagagacagtccgggaaggtttttgtaccagaggtgtcatcagaactaggactcaaaggaggggcaggagttcaccaggctgaggaattcctgaaaacttcagtgcccctgccatcgtctcactaccctgagtggtgatgttggggtggacaggagcatctgaggttgcctggggaatgagggaagctgttgtttcccactccccaagagtctgtctgatctccagaggcatctctcttccagtcaggcaggccagagacccctgacacacaaagttgggctcttttctcatcttcatccagagagtgataataggttatttttagggtggcacagctgcacgaagtatgacagtaaccatgagacaccaagcactgtgtccaggagtaaccatagggcacaaggaccagccaagggccagagaggcttacatctcctccccccaacccctgaagtccagcttcagccctggagaggtatccaggcccctctgcccaccctggagcacctagggccagtggaaatccacctcttagggatcttgtctaagtaaagaagagcagagcaaagctctgccctggccttggcgctgctccctggacatcccttgcccctggacaagcctatgctgtgtcttccacaaagaagcttgctggggactggattatgactctagagtctcctcccagcctcctcttctcaagcctgaacttctcccgttccttcaacttccaggtccctcgacattactgagcctagcctttgctctaagttttggtgatttccctctctcaattggtgtctcagagggccctggggtagagagatggtgactcttctagagtgggccacagccccttgtgtgcagatcccagcttcctgtaaacagcctcagatcaggccaaacctgtggtcagccagagccactgctacccagtgaggtcttccacaccctactgacacggtgaatgatttttaaatttgaatgaaaggctttttaatcaaccccatacacatttaatgcattggctttaatccagcagcctgttgagagctattagcacttattgattgcccacttactgtatgccaggcaccgtgctaagtgttgtatgtgcattattacatttaatcctcacaaggaccacataacataggtacgaatcgccacattctccagatgcagaagcgagacccagagaggctgggtaatcaatccaaggtcacacagactgcgggggctggcgctgagcttggaacccaggtttgcctgaccttctgggctttcctaagagatcttattttttcccaaaagagtttcaagagtgcccagcactgggctcagtggcgggctcggaggttgttttcgttcatgtaggaactatcacttccccatttttttcataagaaaactgagtctcagtcctgatacacagccaggaagttgtgatgttcaggctccaacctgggtttacatggctccgaggctggggctcttttctagtcctcagacacactgtcgcacgcctgtggcagaagctcccatctcacacttgccgaccctcaactcacacagtcctgagacccacatacgctgagcgcctcacactcctataacacgcacatgccctgatgcacacacattttcaacacgcacttactctacccttcaggcatggtttcacactcactgcagacacgtcaccctcccacacgtctccaccctgggggtgtgcagtagcatgctctctcccacctcagaacctcccttcagtcccctcagacacatgccctctctccacgcagagacaatcaaagctgaactaacaccttccagggtgaaaagcaaatgcccagtaaggtacgtcttgggtgcctccgtgtcccctgagtttggtcctatcaaaccagcgatgatgaggcagcttttctttcgttccttcctccatcatcaaacaagtgctcctgcatctcctctgggccgggcctacgtcagcaaggtctgagggaagcggccaaggagagtgatgacggcagcccaggttgatcagagaaaggaggcaggtccatgcgcagtaactcagggaaaacatgatgaggacctaaggatgagaaagaagcctccagagttccctgtgcagagagattccatcaatttcagagggtcaggggagtgccatgcattcatccaacaaatatttattgatagtgccaggtgctggggtatattggtgaataaaacatcttcatggaatttgcagtctattgagggagatgattataaatagctagagaaatgcatgtacagcagatactgtggagcaaacaggttgcagacaataataggggaaacctactttatagtaaggtagtagccaggaagagcctctctgaggaggcagcatttaaggcaagccctgaaggttgagttgagccagccttatgaagagcaagggcaaaagccttccaggaaaagggaatagtgtgtgcaaaggccctggggtagggaagactttagtattgtcacagagcttttaaaaagctgagtggctgcagcatagtgtgtggggtgtttgtggcaggaattaggttggcaggagggggttcttcatcctataagcagtggaaggtcattaatattcttttttatttgtttttttttttttttttttttttttttttgaggcagagtctcactttgtcacccaggctggagtgcagtgaggtgatcttggctcactgcaacctccacctcccgggttcaagcaattatcctggcttcctcagcctcccaagtagctgggattacaggtgtgcaccaccatgcccagctactaatttttgtattattagtagagacagaattccaccatgttggccaggctggtcttgaactcttgacctcaggtgatccgcccgcctcagcctcccaaagtgctgggattacaggggtgagtcaccgcatccggccggagatcattaatattctaaacagtgggggagaggacacagtttgcgatttagatagattaagccagccactgtgtggagcatggactgtagggagacagcaggtagacgtattcaggaagctgatgcagtagtccaggtgagagtttgtggtgggcaggaagcaggatagagggggagggaggcaaggactcttttagagagagacataagaggacttgccaaggggctgaatgtgaatccaggtgattcctgggtgagaaactgggtaaagggaggtgccccttattataatgggaaagacctagagaaaatggatcttggggtgaaaacaagagtttggaggaggtggggattctggacaggtttgaataagcagaaaggagtggggtggacattccagagagggatagcttacatgaagtggccacggtggcatgtctggggactggaggggccctggagcctccctctgcaggtagggagactcctaggagctatgtggaccaacactgttcccttaggagcttctcatcctccctccaggtatgaggcccggttccagcagaagcttctcgaatacacagactccaacaacattgcttccctcttcctcacagctgccaacagatggctggaagtccgaatggcaagtgctattcccctctaccctggcctctgataggagggtggggccagagcaagagcacacaggtacctggggatgaaagagaggataggataccagatcgtgtggacaccaagccttcctgcttcccccagccctggtggtcctcctagtgtctagcctgtgctccttttccccatatcactgcctggaggcttgtgtatctgaggtgtgtgccagtggcaagaacagttgtggtgaatgtgtatctgcagtgggtcatatgacacccacattgtgtgtgtttgtgggccagctgaggcgtgcatgttaaagggtgtgcaggggctagggggtaggggagcatgagcttgtgggacatgttggctcctggggctccagccttcgcagcccttgtgtgtgtctggtgacgtgtgcatgagttgcagggctggagtggaggcctggctgagctgctctctgccccgaaaaggagtgaggtagaacaggggcctgtggctctaacccctgagcgcccaggtcagctcctctccctccccaggagtacatcggtgcatgtgtggtgctcatcgcagcggtgacctccatctccaactccctgcacagggagctctctgctggcctggtgggcctgggccttacctacgccctaatggtgagcggcagtgggctagggcagaggaggggtcagacaccagcactcccggagcaccttcgtcactggagacatgagacactcccaggccttaccccaatttcatttgcatctgatgccagagggacagtgcgggcaggaaggctgaccagcaggccccagggcccaggccccagacaggtggaggttggggagccacatgactgaccctccctgtgcctccagggagggctgctctgagcaggcagtggatggcagcaaaaggaatctggggccctggcccctctccagccttaagaagagccattctggtggctgaggacagaactaagcgaccatggagtgtgcgccactggcttgctccccacaggtctccaactacctcaactggatggtgaggaacctggcagacatggagctccagctgggggctgtgaagcgcatccatgggctcctgaaaaccgaggcagagagctacgaggggctcctgggtgagaggctcagggagaggggtggggaagagtccaaggaggagtgtgtctgggttgggggccacaagggagcctggggatggggtggcactttcggatactagctgtggcccatgcctggtggctgagcccagcccggcccccagcaccatcgctgatcccaaagaactggccagaccaagggaagatccagatccagaacctgagcgtgcgctacgacagctccctgaagccggtgctgaagcacgtcaatgccctcatcgcccctggacagaaggtcagagcacgggcccaacccaatgctgcaggacaggcgtgagcaggggatggggcatgcacggagctggatggcttcgcagtcacctcgtggccctccagggccgaggcctctcactattcagacatcgcagtctcctgccctgggcctgtgggggcccatctttcctctccttctattgccttcccccagtgctgccctcaggccttgtcttctcactcatccaccaaggagaccgacactctggactcccccagctcacacgggctttgtcagggcctccctctctgcgaatggtcaggggctttccctagggcactgccccgagcttcagggcagggacctgggggcagacagcgaggccacccttgtattgagggtgagcccctgcctatggccctggcccagctctcctctcgtttcccactctgtctctttgtctctgtctcactttgctgtggctgtccatgtcattctctgaccttgggatgtacctctgtccctgcctctctcatccttctatgtcactatctgtctccgtattgtaatttctgttggtacccaagtgccaggaagcaacgggatcagaggtggctccattgtagggcggggcacacagacacatccatgcataccactctcagctgcccctgtgtcctcctgccacacccatgcccatagagacacaccactgccccccagctctccttcagccaagtacccggcacacccagacccacaccaaggcccaggcaaatggacatccatgcctgcacttgcgtgccggtccctgtgtaagccctctctggacccactgcaggaaacaagcccaaacctgtggtgtccaaagagaaactagtcagaaaaccaggccaaaaagataccctgtgacctcccacacctgcacacacacccagagctagcatagaggctattcccagcagccccagagtcccagtggcggtgcctgcttctctctttccagatcgggatctgcggccgcaccggcagtgggaagtcctccttctctcttgccttcttccgcatggtggacacgttcgaaggtgagttgtaaggcgggcaccccacgtgtacccacagccaccagatgaggcctcagccctggcacgtggtcagacatgacaggaggcccagcagtcaccgccttcccctgcaccctcactgggacccatgcagggcacatcatcattgatggcattgacatcgccaaactgccgctgcacaccctgcgctcacgcctctccatcatcctgcaggaccccgtcctcttcagcggcaccatccggtgagccccaccacccctcaggcccacccagccccaggccggctcagttccatcagatctggagcacaaagaggagggggttgggggagaccaggatcccagaggtgtttcctgctcatgcccttctccatcccatcaggcccaggcagcctctggaaggggatcccccacccatgggtctaagatgctgtcccccacccactgccaccacctcggtgcttctcccagccagacctccaactcagtctgctctcgctcactgccctctttgccgcctggggatgcaggcaggaccctgctccctccctactggggctttctgtgccacttccagatttaacctggaccctgagaggaagtgctcagatagcacactgtgggaggccctggaaatcgcccagctgaagctggtggtgaaggcactgccaggaggcctcggtaactactcctggctatgcagctgggttggttgggcactcaaggaccctgtaaggatggcagacagaagcccgtgtctcaggtttgccccaagtttggagtctgaagcctggcaggaccatttagtcctacttctcactatacgggggcccagagaggtcaggtgtcttgccccaggtcacacaactggtcagttcagggtctggctcctcctgcagggtacagcgggtacagtcagggatccttgtgagacagagattgcgagtcccccatgccaagggggcatcttcagccctgccctgccccatccacctgcatgcccagttctgccttaggggaggagaagatggactgggcaatcatagacacgggtcactcatcaaggccaccggtgattggcaaagccttggtatatttgctgcagctcctggagcattgggggtggccaagccttggtttcaatgaatcaccctaccaaggccctacatacacactcagtgcacccctcagtgcacacgccccctcccagaactgcccagggccacagcagcacacacctccaggggtgcccttctcgttgcagtccttgcagacggcctccacattgttgtgtcaggtgcaccagccctgcacacgcctgtgctcttggacacacacccacctatttgcccccatgcacacattttccaacagccccccaagccatcccatctgctccactcacagcacaagattaactcagtcctacttcatctccccgggctgttttcagatgccatcatcacagaaggcggggagaatttcagccagggacagaggcagctgttctgcctggcccgggccttcgtgaggaagaccagcatcttcatcatggacgaggccacggcttccattgacatggccacggttggtcctgggcccctccatgggaccatggtcttggaaagggtttagtgggatgctagggagaaatttgcacgaagtagtcctgaggctcaagttgcctctaacatcaaatgctatgtgttgcagaaaatgaaaagagctggggggaccctgactctgtctagtcttagggaatgttacacacacacacgcacacacaaaaacactatgcaaacacacacataagctgcacacacagacccacacagacttcacactgtcacctatcacaacagcacacacacagccacaaccacaacctacatacacacacagagctgagctcccaacaggctgagtccagtccctgagtgccgggaacctgttcagtcctgtggggtgggggtgggactaggatcggggtcagatgggagctgagccacagacctgggctccacatcccccaagccaggccagaccccatccactgggcaggtgagccaacagctgttgcccccacttggcaggaaaacatcctccaaaaggtggtgatgacagccttcgcagaccgcactgtggtcaccatcgcggtaaggggcccattgatggggtgcagagggacacccagggacaggactggcctgttgtggccgtcatcagtgcacagcccctgggcttgcctggtcccagtaatcaagaaagaaccctgaagcaggcagttcagggcaaggggcctggagggcatgcagggagcctgggttgcaggatttggggtggggggttttgcccctgtgcttccctcagacctcccctctccttctccaggttccaaggcctgcccctgtcccaaggccttatatgttaggctggcgttacttctccataggaagtgggggaggggttgtggagggtctctgagccttgaagcctggaggtggggtagagttgggacttggagaggagagaagggtggtattagcagatggagagcttgtagtcacatccaccccaggaaagtgcagtccccacagtgacaggacattctggccacatgcctcatcctcctcctccaagccgcaggagggccaccctcagctgtggcccccaccgcgggtggtattcccaccatcctgacccgccccctcctgccctgcccagcatcgagtgcacaccatcctgagtgcagacctggtgatcgtcctgaagcggggtgccatccttgagttcgataagccagagaagctgctcagccggaaggacagcgtcttcgcctccttcgtccgtgcagacaagtgacctgccagagcccaagtgccatcccacattcggaccctgcccatacccctgcctgggttttctaactgtaaatcact

SEQ ID NO: 15337 - DNA, 83937 bp, Homo sapiens
gcggcaggcgcgcggagccagcggagccagctgagcccgagcccagcccgcgcccgcgccgccatgcccctggccttctgcggcagcgagaaccactcggccgcctaccgggtggaccagggggtcctcaacaacggctgctttgtggacgcgctcaacgtggtgccgcacgtcttcctactcttcatcaccttccccatcctcttcattggtgagtgcgcgcagcgagccgcggaggaggggacgggagagcagggagggaggaggaggcgctgcgcgccgcaccgctcggcgtccccttccggcccgcgaccgccgtccgcctcgttcccggggtcccctgccctgtgtcctgcccgccggtccccgcactcgcacaccagctcatcccttcactcccccggtgcccccgatcccgcgccaaacacagcggacgtttgtgacccatgggatcaccaagttttgcttctgcagggccaagagctgggatggggaaaagggaaagaggaggtctcagcacgcagtgggaaactggagaggggtcgggcctcaccctccgtggcgcagcttagggagccgggtcacccctcccgcaaggcagcctccctgtcagccgcagctgggcctagggaagagggaagcctgtgctttggagtctgggatggaggcccagctaacccctatgctttcaccgggctgagccgcgcagtggtccgtgatctctgacagtcccaggcccgcgccctgggcgaggagaggcgagagctagggacttggattcccttcccccgccaccccacccgggcatgtgtctccagagcgcaacttctcaggctctgcgcaaagtagctccgactcgccgacgcagcgaccccggcgcccttgcttgcaaagttgggcgccacggccgggacaatcgtgcgtgcctctccactgaggtcccccccatctctctccaagaccttgactcttccagaccagtcaagtctatcaactcatagggtgtcccctgcatccccaaaacgtgttcattcactttaagaaaacaagcaaatcttaaaattcatatacagctttggggaagaaaggaaagattgtcacaaaattagatttacaagaggttgctgcagaagcagagttgctagttattaacaaagacagttagatagaaatagaaataaaacatacaaaatatgtgctcatatgtgcatcaaaaatcaaaaaagaacagcatttacacttctgttctcagccaaacggtttattaacctgatgacttgtcacacaagaagttagtatgtataatggggtaccttggcagggcacagtggcttacatctgtaatctcagcattttggtgggctgtgacaggaagactgcttgagtccaggagttcgagaccagcctgggcaacatagtgagaccccccccgccctttctacaaaaaattaaaaattagctgagcatggtgatgtgcgcctgtagtcccagctactcaggaggctgaggcgggaggatcacttgagcctaggagatcaaggctgtagtgagccgtgatcgtggcactgcactccagcagaggcaacagagcaagaccctgtctcagtaaaaaggtgtggtgggggaggtaccagcataggaccaggctgaatgagttggacgtttagtttgtgtgtaccagccttggggatcctcatgtgtaggtgtcaccctcaccatggacccaatgcccaagcacctttctggggttcatgcaccctcttcctcctccaagtgggcaggcatcctgcctctgactgtctctccctgcaggatggggaagtcagagctccaaggtgcacatccaccacagcacatggcttcatttccctgggcacaacctgcggtggatcctgaccttcatgctgctcttcgtcctggtgtgtgagattgcagagggcatcctgtctgatgggtgagtgactgtctgaggactcaggaaagtgaatctgctccagggtacttcctgaaaggcccaaggagatcctagctcacctatattccacaagcccatgtcttttgttactacatccagcagctcagtgtcttctatgtgccaacctctctgagctgggcactggacgcaagtgagtcccaggccctgccatcagtccaggagagcagagggaacacggacctgcatgccaagtcccagtgaaataatgctagagcctattagaatgccacaactccagtgaaaaatgtctggcctcttctacaacctgccggagttaccttcttggaaaaaaaaaaaaatctaaccatgccacccactcttgcataagacctttccttggttctcagctgttttgaagatgtggtctcagatcctcagcccaccattcaaggtcttcacagtcagccccacctatctctggcctcattccccatgcccaccttccgtttgggcctcacagcacactcctcacacctctgctacagcacagatcacactgtatgttaaagtttatgtctatttgcaaaactgtcttcagagtcagaaaggcctaagagttagaatctgagtcttgttcatctttgtgttcacagtgcaaggcatgtgataaacataaacattattcagtccataaacatttattgggtccttaggagaatgaatgaaaccatgttacaaataagtactctgggaggtgagaggaaggcagaattgggcaagctccatggttgagagggctttggagcggagtctggaagggtgactaggcttcagacacacagaggaggaaggagagagagaactggtggtgcctgagggaagggaaaaggcaccaaagagaaaagcaggtagggctagggagcagcgcaggggctggagcattaaacacaggctggggagcgatggaggctgaggctgggaacccaggttggggcatctcaggaggactgtgaatcccagcctgcatgtttgggtcggatttggtcagcagtttggaacagaagagagatgtcatcagcataacacttttaggtgggaacctgaggtgttcagcgcaggctggaggcagggagaatctagaggtataatagaagcaggacttagcattgactgcagtagtctaggtgagcaataactgcagacagaaatggtgtgtcagcagtcagggacagaagaggagcgggagcagccatctcactaaggaagaatccagtaaccagcaaggatgagagactgccaggagagggagtggtggaggagagggatatttggcttgagtatctgaggtccagcgccccctgagctggaatcagattatacccagactgcactcctgcagtgctgcctggctcctgtagttggatggcaggggataggctccctcatcctccctcccgttccccaccttcccttccccaatgtccctgcatcctggcttcagcagtgatctctaaaatacctgcttgacttggaggcagcagctctgcctgcttattaaagtccctagaccagcaagaagaccagaaggcatactgctacacaagcacgtgacaagtccgcctccacccccacccctacaccccttccaaagtagcacaaatgccacagtgagccctcagatgggaaatactcaccagatggtgacagagaaagacacctccgcccttggagaaggaagacctgggtcttcagtgagcactgctgctgtgtaccagctatgggactttgcacaagtcattcaggctttctgggcctcataagcatttataaacatacgataaaacattttagttgccaacttaaaaatgtgtgagaaagtataaggtgtttcaaaattatttcaaggagtaaagaggcaagagttttgaagatccctgggcagggtgttggctgttcccagtgtggccattcatgactgctctctggccttatgaaacaagcatcatagtccctggcttgcctgcttcatggggctgtggagggtgaaattcgagcatggacagggtgcagagcccggagtggcagagcactgggtagactgtgtattcccagaatgtgggaaactggaatgaatcggtccagggatgccctcctgctggctgtcagcagcccctcctgtgtgtggctgtactgcttcagctcagtgcaaagggccatctcctccccagggcacagatcagctcaagctgagtaattgtcatctggtctttgtgagctcctacccccaggcctgagtgaggggcaggaaaagagcagacaggagaagtcacagacccttgtgatacctccagtctaatccagcctgggttttcagagctgtctggaaatttagggggcaggtgggagggggctgattaaggcagccctgatttgatttagagtgagcctcatttagtgactaattaagccatcttaaacctgtagggcttcccctcttcctttgggtattatttctttctgtgatgttctgaattcagaacaatcaaaacagtataagttagtgaagaagatattttttaataactacaatattttcccagaccaccatacactggataaagcctgtatataaaactttacctaatttcttaactaattgaatgtgtattatttaacaaagcagctaaaaactattctatgaagccatgtcatgaaatatttagttcaattatggttaatcctcatcttatttcgtcttataaaattttaacatttctacctcctattgcaaaaaaaagcatttatatcagcatataataaaacatgtctagatgtcagcttaaaaatgtgtgagagagtagagggtgtttcaaaattatttcaaggagtaaagaggcaagagttttgaagatccccaggaagggtgttggctgtgcccagtgttgccattcatgactgctctctggccttgtctgtcttgtaccttctatattagtttgaagaccttttttggagaatattcactaaagaatatcaatatctaccatttcattaaaaaagaaatgtggagtttgccttttcaagttggtttgatgcttattgatgttttcagggacccagcctcttcccatctttccataccatcctgtgtgtgtgtgtcagcctatcttccccatggtcacaaggtggctgcctagctccgggtattgcttagcatgagcagagagggcatgctgccgacatgcctctcctttatgacagagatcattctttctttgacatctcactggccagaatacgtggaccaacactggcaaaggagtatggaattgcatggctgcttaaaccaatcaccatccattccctggggctgggtatattgctgctggagcaaacctgtggtcctcctggcacagaataaggggaagatactctttggtggacagcccacattgcctctacacttgcacctcagtcccaccagacccactgaggtcacaggatagctctcctcatgtccttcctccttctctgttgaactcttatgtatccttcaaagtccagcctggtgccacctcctctgggaagctgtccttggttgcccaccccctcctttgtgctctctcagtctctgtccatcggcagtatcacttccctagcctgctgactccaacagttagctctgagcatggcagccccctccataccatcagcttctcaagggcagggacccttggcacactggatagaagtagcctggtgggcaacagcagcactgaggcagcaagctgtagcaggccatctgggaatggagtgggtaccacagggctggagcagaaagggcaggctgggcagatctgataaagtggctggaggccacatagcctgggcctttcgttccaggctgagcagagtgggttttgctgtctgcaggagggagctgtggaagggcatgatcacgaccaactaaggtgaccctcctcaccaggcccagggaagactgaggcctggaaggaggctctggctgcctctgggtcttacccccaggccacagtccacccacttagaggcctctgtgagttaaggtggagagactatgagctggtattgactgctccattccccatcccgagagaggagacaaaatcagtgaccttggaaatgcctcttcgtgcctcagtttcctcaccccataaaatgggagactaagagtacccactcgatggggtttaatgaagattaaatgggttaacatatatcgcatgcttagaacagtgcctggcacagagtaaatgctccataaatactgactctcatcagtttgttatcacagcctctggggagggcgccagtgctgacttatgctgttcgtgttaaatggggctgtcactgggtgagttgtggcatacaggcccctgcactgttcaagagaccccagcaacccttgtgcttagggctcagcacatagtaaggcctccagatcatatacccagctctactccatgtactggcagctctgcccagcccataccccaaatacgcccattaactaaagggccctgcagcctataaagtgatgctataaaggttcagtgttcagcctttgaaattcaaggcctgggctgctctattgcagtacttagcatgtccccatcctgtctgtttctctctcccatctcagggtgaccgaatcccaccatctgcacctgtacatgccagccgggatggcgttcatggctgctgtcacctccgtggtctactatcacaacatcgagacttccaacttccccaagctgctaattggtaggtgaggtgtaggagggaggggcagtaccttcattcatttcttcagataatgtttactgaggactcattatgtgccagctattgctctaaacagtagagatttggaatagaaaaagaaaaaaatccctgccttcatggagcttacagtctggtgaaggaggatagacaggcaaagacagtgaataaacaagcaaacaaataggtggtggggatgctatgaagaaaatcaagctgagtaaggggtaggggcaatgacaatgttgctatctacacaggatggtcagggaagggctgtggtaactgtgggcatgcagatatttgggggaaggtattccctgcaaggggagtgacaagtgcaaagtcctctgatagggatagatttggcaaagatgtcactgtgggcaaagccaaatgagcaaggggaagagtgggaggtgagggcaggcgtcaggagaggagcgagcaagagtcccaggctctgggcctgagagcctgggtgaactgtggcatcaataactgatgtgacagaggagggggaggtgggctgtggtggggataaagttttctactgggggcatatcgagtttgagatgtcacagagacagccaactcaagtgtcaagttgggctttcatggggaggtcaggacaggagctacactttcaggaggtgggccttgtagatgacatctaaagcttgagcctggggctggctgccgtggctcacacctgtaaccccagcactttgggaggccgaggtgggcggatcacccgaggtcaggagtttgagaccagcctgaccaacatggagaaacccccacctctactaaaaatagaaaaattagctgggcatggtggcacgcatcggtggtcccaggtactcaggaggctgaggcagtcaaatctcttgaacccaggaggtggagattgtagtgagctgagatcgcgccactgcagtccagcctgggtgacagagcaagactccatctagaaggaaggaaggaaggaaggaaggagggagggagggaagggagggagggaggagggagggagaagaaagcttgagcctggatgaggtcacctggggagagaagagaaaggctctgggaccagagcttgaggtttgctaacatttagagagactcgggaaggactgcccacttagagcttctgagatgttaaatactgcaggactggggtcccaggcagaagcaacaggatgatggttggtgtttactgagcatgtgccatggggcaggctccatgccatgttccttacattcattgtcccacaggctaattcccccagcctccttattggtattgttaatatccccattttccagtgtggaccctgaaactgagaggttaaaaataataacagtaaatactcactttgtacttactgtatgccaggccccatcctacctatgtgatatattaattcatttaatccttgcaacaactctatgaggtaggtaccattattattttccctttacatatcagaaaactgaggctcagaggttaaataactggcactagtctagctcgtcaaggggcacagccgggagtctagcatctgtgcaatctcctaatcatttctgagactgcgtgtctaagggccctcagacttcgtccttggggtaaaggtatcaatccgcaggtctgcctctgtgttggggttcagcctgtgtgtctaaggctggggctgtacatctggcagttagactttgttcacactatgtccttaagtcagactgatttttaggtatcacagcatcgaattgacatttggagtctggcacactctgtgctaagccagtgacatcatggtgttgtcagggagtacagggtgtttcttgcactagtcacaggtctgcctttctgtagaaggtgggatctgagctccattaggattatccaggtgatccccctacccctagcccaggggcccccacatgagtatgaatgggagctgggggaagcaggttgagaggggagatgttaaatacaggcttcagagagccaccctgcttccatttctgaagtagctccttgtctgtagagaacccttcattaaccagggcctggctgaccagtgtcctctggaaacaccctgtctggacatctgaggagttcattttctcattctccagcaaacacataatgttctctctttaaagcacaagttatcacccgtggatggatttgtccttttctaaggaacaaagactaactccctccattccccttgttggagttatctccccttgaaaggacactccacagagccagaaattctagaacagggaaaagtggaggggacgtgcctgtgaactgcagggacagaaggaaatgggtattgggagaatggccagccctccaaggggctgatgtctggcctgggtatggagtcccacagaaaggggacctgtgatgcagcttacattgtcccgtgagggaaccatgatcctggaacccagatgaggccaaggaaatgttctctgaaaaagtcatatttgagctgagaactgaaggaactaactgggagaagggaggaaagagtgcttcaggcagaggaaacagcatgtgcaaaggccccaaggcagaaggaacaaaacacattagaaaattcagaagaagaagagtggcgtgggtgcaaagtggaggggagctggactttgggttttgtttgcttgtgcccaggctggagtgcagtggcaccaccttgggtcactacaacctccgcttcctgggttcaagcggattcttgtgcctcagcctgctgagtagctgggaatacaggcgtgtaccaccacactcagataattttttgtatttttagaagagttgggatttcaccctgttgaccatgctggtcttgaactcctggccttaagtgatcaggtctcaacttcccaaagtgttgggattacagccgtgagccaccgcacccacctggaaggtcataccacagatgtttgcctttatcccaacagcaatgggaagttgtgtgtgtgtgtgtgtgtgtgtgtgtgtgtgtgtgtgtgtgtggtttaacatgtttaacataaaatttatcatcttaactgtttttaagtatagtgttctgtggcattaagtatattcacagccgggcatggtggctcatgcctgtaatcccagcaccttggcaggccaaggcaggtgaattgcttgagctcagaagttcgagaccagcctggccaacatgccaaaaccccgtctctacaaaaaacataaaaattagctgggcgtggtaatgtacacctgtagttccagctacttgggaggctgaggtgggagtatcatgggaggctgaggagagaggatcagttgagcctggaaagtggaggctacagtgagccaagattgtgccactgcactccagccaagattgtgccactgcactccagcctggacaacagagtgagaccctgtctcaaaaaaagaaaaaaaaagtatattcacagtgctgtgtagccatcaccactatccatctccagaactttttcatcttcccaggttgaaactctgtactcattaaatgataactccccatttctccctccttacagcccctgacgaccaccattctactttctatctatgaatttgagcactctaggtacctcatctaagcggcatcatgcactgtctttttttttttttttttttttgagatggagtcttgctctgttgcccaggttggagtgcagtggtgcaatctcggctcaccgcaacctctgcttctctggttcaagcgattctcctgcctcagcctcctgagtaactgggactataggtacctgccaccacgcctggctaatttttgtatttttagtagagacggggtttcaccatattggctaggctggtctcaaactcctgatcttgtgatctgcccacctcggcctcccaaagtgctcggattacaggcgagagccaccttgcctggcctatttgtctttttatgacttgcttatttcactgagcataatgtcctcaaggttcatccatgttgtagcatgtattgaaatttccttcctttttaaggctaatattctactgtatggatatgccacattttgtttatctattcgtctgtcagtgggttgcttccacctcttgactcttgtaaatagcactgctatgaacatgggtgcattgaggggttttcgacataatcataataattgctttatggagaccagcttggaggagaacaagatggggaggaagtgtggaaaccaatgagaaggctctcagggtatagcgggaatacagaggacgcatgatgatgcctggacttaggtggtaccacagggatggagagaagtagatagagtcaagctatttaggacgtgaaatagacagcatttgttaatgggagaggtgtggggcgagggagaagaatagagggagaaggaggagtaatgggagctcaccagcagcccccatgttatgcctctttccttccttttccctcttctctcatcaggcattcagcttttgctgagtacttctgtgtctgacaacaggctgagcactcagcactgcaggacaggactatgcaaaaaacctctgggcctagtcctgggtgcactgctaattccctgtgtgaccttgcacaagacatccaagctctctgagcctcggattccccacctgggcaggaagagtaagtccctgcctaagtcatagggttgtaatgaagagcaaagcagaccatatctgttaagtgttagggacaagacaagcatgaggcatattttcaagtctcggctcctgtaggcagctctcactaagggctaaagggcttctgatgcctgggatagaatctgtccggcagagtggagtggaggcagggggacagccttcagctgtggaattcctccagtcctagagaccagcctgagctgggggacattattccagtcctgaggcatgagagcagaaggccgatgcttctgccctccatcctaatgtcctcctgcagggacccaaggtggatggcatcgatccccccgggtgagctcagccctgggcgcatggtggggcccaacatctcaacctgtttcctaaccctgagccaggcaggacagatcccagatttgtgcccaagagatgctctggcatccatgcccaggcccacatagggatagagggcagggtgaaagtctctctccctcactcgggtcctctggagaggggctctgtgtcatgaagctgaccttatccgcatctggtctaggagggaggagggaaggagctgccagtgctaaaatctcccccaccctcaaagggggacttcacaggttattgctggttttggttgttggaagctgacagtgatttattggcagattgaagtgagtgtgtgtgcgagaatttaggatagaatctactgatagcttctgaggtttaccttccccaggtcttaaatctggagataataaaaatataacagctaatgtccaaagagcacccgctgcgtgtgaggctcactgcactaaatgctttccatatgtttctcacaagaaccttctaggtagcactattatgattcccacttaatggatgaggaaactaagctctagaaggctaagtgactaatccaaggtcacacagctattatgtcacaggctctgagcccaggtgtatctggctgcggagccaccaccactaacccctgtataacgctgcctcacagaactgtggctggctctttccgtatcccccatgcccctgctccatcatcatgctgtggtgggctctgaactgtgaggacagggatccaggctttcaccctctctctgtccctagctgccagtgcacttgggcaaggtcacatcctatttctgggcctcagtttcctcatctgtaaaatgaaaggctggattgaatgacctttaagatttccctcacttggaaattccacaagtaagtcattatagcatggagcttgcatgcatgggctccagcgtcaggccagcccagctctgccagttaatgggtgtgtggccttggatctgttacctaacctttctgagcctcatttcctttgtctgagaaattgggggtgacggcagtgtactttctttgaaaagttatggtgaggaatagataagatcatgtgtttaaagtgcttacttggcacagtgcctgtaacttagttaaattcaataaataaatttcccattcttcccatgatcatttatttttaagggacatttgtctgaccagtttgatttatgagattattggtgtttttcatgaatgttaagacgtacgtgcgtcatcttagagtcatgtactctgatatattcacacgtgcacatccacttactcggaaatgtacacacccaggcacgcttattctgtctccttctctgccacatacttgcacacattatgtgagtgtacacacatgatgcacacacgtctctgcgatcttccatctctcctcggcagccctgctggtgtattggaccctggccttcatcaccaagaccatcaagtttgtcaagttcttggaccacgccatcggcttctcgcagctacgcttctgcctcacagggctgctggtgatcctctatgggatgctgctcctcgtggaggtcaatgtcatcagggtgagggtaagcaggccacctgggccagggtggggtgggaagcagaggctctggcctctgtcctgccctgggttcaggcccccaccctgcttctcagccaaactgagaagggatcagcttgttttacccgcccgtgtaaaggggagtggggccgtggcggaaatttcaggatagacactgcatctggcccacgtgtgctctaccccagggtcccagagggagaggggggtgatgggtgtgttcgctgaggttggcggatgactttccgtagaaagggaagataagcatcaggcactggcctctcctactttctttcttcgggggtgggggactttgctttaatgtattcatatcgtcacgctggtaaatgaatgagtaagtgttttgttttcctttctgtttgctcccgcctccctctctcttcctcaccccagactccaaccttccccttcccctgcccctacctccccaggcagcccagactaatgaactcgtttgtctttcccatgctttgtttttattagtataataccatatgtgtctgtctaaataaatacctattcaggttttttcctctcaacacaagtgaatatgtaggtttcccccacggtatttatcttgtaagaatgggatcatattatgcagttttctgcactgtgcttttctcacccaacaaatatctcttgggactccctccaagccatctgatatggctaattccgttttcttaatggctgcataatattccatcgtatggatgagccataatgtgttcagctatttctctatggatgggcatttactttgttgccaagttcttgccttcatgaataatggtgtgttgaacatacttatatatttatgtattgctgcttttatttctatgggagagagtccaaggaatggcgttgctgggtcaaagggtctgtgtattttaaattttgatcagtgttacatattgccttccagaaagactgtaatctgccagcaatgagtgagaaaaccctttccctgccttccaaccagcagtgagggctacagccctttcgaacttggactgcctgcatttctctgactcttctgcttttagttggtgatctgcagggcacaaagctccttatgtgtccccccatccagtgaccctcacaggaaccctgtgatgcaagcaccatcccctttatagatgaggaaacattttagatgaggcttgtccaaaaacaccttgctagtaagtggaggaggcaggattcaaaaccaggtctgcatgacttggagttctgtgaactgtatatgaaacatggtggtatccttagatctgtggagaagatagcatatgagagattcctgctcctccccaacccaacctaaacccaacccagcctagccatggggggttcaaagtcgacctcaatgagcagttacaaagtcaggatgccctgacattggtggccaagaagtgttggggaatccttttcctggtaataattacaggcgaaagatggccccatctgttagagatcaagtgtggaatatcacaaccccagatccttgctggggcaaggtagggagtggtgagaagttggacttacccatcccccatggcccatgtgccccacagagatacatcttcttcaagacaccgagggaggtgaagcctcccgaggacctgcaagacctgggggtacgcttcctgcagcccttcgtgaatctgctgtccaaaggcacctactggtggatgaacgccttcatcaagactgcccacaagaagcccatcgacttgcgagccatcgggaagctgcccatcgccatgagggccctcaccaactaccaacggctctgcgaggcctttgacgcccaggtggtcagtgggggcacagccacaccatctattcactgccttctggtttagggtcacagagagggacctcaaagggcattaggtcaaaatcctggtgggacaagaggggaaactgaggctggtgaggggaagaagcttgccttaagtcacacagtgaaccagggacaggtgcagggctgaggattcataggacaggcacagttggaatggcccttaccgtttaggtcgtctagtccaaagtccttatccagatggggaaactgaggctctgagaagggaagtgaccccactggactctcacatccctgtgctctttcctctgcagcttactgactataaaggttggagtgttcacttgatttggagcaggggtgttagtggcctgatccttatggtaactctatgagttgagccagacaggaatctccccatatcactgaggagcaaattgaggccctgagaaaggctgtgacctgcccagagctggccacagctggcaggcggcagaggcagtctcctggctcccagtccagtgctccttcacttcctctgccctcgcaccagggcagttgctgaggcagacacggtggcaggtggtaatgagtgagtgtggcacatggccacctcctcattccagtgctgtgctcatcacatagtccctgaccagctgtgtgaccttgagcaatcatctggccttagtttccccatctagaccatgttggtgttgatagggccctcccaactgtgcacttgctgattccatgatctcttcctggagttcacctatttgcagaggatgtgaccactgggtttccccagacaacaggagctaggggcatcctgggaggctaggcccagccgtgaattagccctcaggcactctgacctggccatggtctctctgggcagcggaaggacattcagggcactcaaggtgcccgggccatctggcaggcactcagccatgccttcgggaggcgcctggtcctcagcagcactttccgcatcttggccgacctgctgggcttcgccgggccactgtgcatctttgggatcgtggaccaccttgggaaggagaacgacgtcttccagcccaaggtaggcagccccaggggtagggtaaggcaccctctagatggttttcagttgtttctgagagtgcaacaggccaatgtgtgtgagccatggccacactggagtggctcctcacacatgcgcaaagcccatagcagtatccccaccacagaatactctacatctggtcaacagaaatgccagagggcgagcctatgccccaagggtatcctactctcctctcaccgtcactaccatagtacctctcccggtagttaggtcagtccgaaaactgcaggaagtgcttttgtttgtccagtgtctagagcttctgtgacttggatttgttggctttcagttcatgtcatcttagtaaactctttaaaagttttcaagatctgtcttcttcagtcctgtaaaggctggcacttgagctttctgcaggggcatcttgggagctactgtcagaggagagagaagtgggaaaccctcacgagtggagctttgtctctccccactccaaatttcattcaaagctgcccgtagttttattaatatgttggacttttccattaaaatttcttttttaagaaaagtttccatggcttaaaaaacactggagacttattagactagattatatccaatggccttggcagttgtaacgattctgcaaactgaaatttgttggagctagaaaacctttccccggggttatttgccctgcgtggggccgtagcatccacttcgggggctgggcagactgtgctctgttgtctgtttccttgcagccgtttaggtttaaatggccacaaaatgaaaactttttcacccctaataagtttcagagttttagtttccaagtgaggatgtcattataacattttaaccacagacagtctgaaaataatgcagagaatggggaattagggtttttaataatttatgacaccctttgcgtaacatttgttcatctcatgagctccaaaatcgcagccagcagttaatcctcaggaggtttatgttcatttttctggagacataattagtcagctgaacagttttggccacagatatgagatacgttgagtctgatttatgcagcaaactttcattgaacactgctgtgtgccaggcctgggttgggctgtgggaatatgaaagcaatagttatgatgaggatgattaacaatattaacagccacttactgaccacataatacatacctggctgtgtgcaggagttatccatgtgttatttaatccctaaaactatcctttggcgtgagtatattttgcaacatctttactgtggtatacctcaaatactgtacagtttatgagatgataggtattcttatccccattttacagatgagaaagttgaggctcagaaagtttaagtaattttccccagggtctctcagctagttaataacagaggcagaatttgaacacaagactcactccacagtctgggcatttacagccaggaagctaaattgactattattatcaagccatcacctctggctccaaggattatgaaatccaacagtgaggagagaaatcaaaataaaatacttttatgctatgtgttacatgtgactcttaggaggaatattcagggaattgtgggaaaagatagtgattaacttagccagtggtcatgaacagcttcatagaggaggggatgtttgaaaggggtcttgacggatgagtaggaatttgccaggctgccatgggaagatttcttgctcaaccaagaatgcaaggaccacttttgcttatttaaactttgatggcttttgaagccatatctggctttttgagcctctctactttacctggcccataaaagagaggggaagcggctgcttctcttgtctacaggagtgtcacctttggctctagcctgaccataggctaccccagaatacccccattggcgatcctgaagcagcatggagccagttgttaatatcagggggaaatggcacaggccagagcccttatcagagtgtccacaccacgctcttcttcctgtgtttcccaaaacccttgtgggattctgctaaggagagagctctgaggcaggacgtgccaaagagatggcgaaagcacttagaattttagttcatctgaacgttatcattgccgtttttttctctttgtttatacacaaaccctggggtttattaccgtctcattggaatgctcttgtcccagttacttagcacacaaatccctgagacagatggccctgcctcagtggcagtgggccttatcagatttaatattttttccctgcagcccaaacacaatcagaaaatttccgacacagaaacaagagttgaaagtaaatatagtctccagtgtccgcaacaaagaactctccatcatgtggttgcctgggatgtggcttaattctcatgtgggcttctgagctcagaaaatgggggaaagggatcatttactgagatcatttggttcatctcccagcccccaagccattctaatccagagagaaccgagtgctattctggtctttatgaatgacaaagaaggaagctccctagctacatgttgcagtgtttcacagtctgggagaggaagccgttttttctgcccagcctgaatccatcctgcagcagttggcacagcgaggcacctgtggtttattcatcatcactcttccttcctaagatactcagagttggcaagaaacatgtcatccttggtatccgcaaggacgaacatttctgatgtcctctttagttactgaaagtgtctgtgacttgccagatctttgatgctcctgtcaccccgctgccactccccagggaaagctgggacccaggttgggctctgcctatgatctatagctctttccagcctcctctccaacccaacccctactcccaatctgtcacctcccatggatgccactgatctggctgaaggacaagagaattagattcataatgagctgctggtgtctgaaacctgccagcactgccctgggctatcagttgagccaaaggaagaaggaacagtctgggtttgatcgaagggctaaagcttcaaacagcctctaagtctcagtaggaaaatgtgtaggtttgggagggtgtatgtgtttccgaatgagttcccctaagaactgcttatggttctatatgtgtgttctgtttgtccctgtgtcttttggtgtgtctttttctgcgtgtgtgtgtgcatgtgtgtgtgtctatgcccccgtttggattgccatatttgtggctatcattatgagtgacttaatgagtgtatatgcattggtgtttctgtgactttgtggttttgatgcatgggctggcctcttcataaccatgtccatgcagctggtctggcctagagtacctgccttcaattcactagctccttcttggccatcaagactctgctcaaatgtcacctgctccagggagccttcacctggttgaattagatgccccttatctgtgctcacataacatcctatcaaagcgccctgtttctttccctgacttgatcctctgtcccctattgcctgacctctgtgtgcccagcactcagcccactgcctgacacccaggagatgcacgggaaatggttctgcaaagaaggaataatgcagcaattactatatattgagtgcttacacttactgttttttcacatgcactgttacattgacttctcataacaactctctgaagtcccttcatagcctcaccttacagatgaggaaactgaagctaagagaggttgaggaacttacctaaggacacagtggctaatatatgatgagtcaggacctctaagtccaggctcttaaccaccgtgtcaaacagtcttgtatgaatgggtaggtgtgttggtctctgggtggccaaagataattttattctttacccagggcctcccggggctgggacctacggacaactcaccttttgacacctgccaaaataggaaacaagagtccaagtgatcccctctcctttaagcaccagagaacatgtgaaggggacctttccaatcatacctctggcctggcagagacaatggggctccaaactgtagagtcgggagtgctgggttttagtcctacctctgcagctaactcatttattctcctcagcagtcacattctgcaagcctcaaatgcaaaatgtgtaataacttctgtagaaagtacatgggggcatgaagatcattggcttgattgcttttaaaaaatcggtattgagcactactggggaaatccctggaaacaaacacaattcttccctgagagcttgtgaaaatgcaagactagggcctatgattttccaaagcattttcttccaccaagtgtcaggttgtaggtccttggtcttttctctcttgccttggtacctgcagggtgctgaccagtgctatcatatcccctccccgtttcctaggaccctcttctcggtagactccaacagggcctgccttccttgggcagcatggcaggcctcttggctagtctagtacccacttcttttttttttttttttttttttggatggagcctcactctgtctcccaggctggagtgcactggcgcaatcttagctcactgcaacctctgcctcctgggttcaagcaattctcctggcccagcctcccaagtagctgggattacaggcatgcatcaccatgtccagctatttttttgtatttttagtagaaacagggtttcagcatgttggccaggctggtctcaaactcccgacctcaggtgatctgcctacttcagcctcccaaaatgctggaattacaggcatgacccaccacgcctagtcaggtacccacttcttaactgaaacttagctattccaggttctatcccttttaaaccaactctttgaagagaggtctaataatgacccaatgacttatagctgcagtgagatttttattttaacaggtcacaaaattctcaatccacaaaagtagatttctgaccctaggttattttgttgggggcggagagaggaagtcaaaggttttgcagcctttagagctgcaaaaccagaatttgttgttttgttaaaaatgcacaaataccgacgagtatatttaagtaacacccatagtctaacgaacaaacatgatcagttggcttttccagccctcattctccagcctgtgtgttttctgctcattgtaacacagcgtgtgtgtggcattccatgtttctccagagctttcatgagaatcagtggtcttggatgcatagtgttcccatgagtaccttaattacctaaccattccctgtggttggaaatttatatgggtttttgcattctccttctgctctgaccccaaaataaatgtctgtgttcatacagctattaccttatgtgaaattattttctttgggataaattctcatgatgtgttgttgctttaaaatagtggactccagtctccagagctgcgtctctgcagaggacagtgggacagaagaatcccagggcatgttaaaaaggaccgggtcttcctaaacccacatgcctatatttctgacccagtaccagccaggggggcaagtttccatcccccacaagtcacaaacctgtaactgacactaggatgcttaaggtcaaaggcctggacgaggcctagacagtgggtctggggtagtgtttttgacatcactcaggttcatgttcacatgttgtccccttaccagcatgtgaccttgggccagccactaaccctactgaaactcctttttttcatgtatgaaatggggctaataatggtaccctcctcattagggtattgtgaggatagagttttgcacctgataaatattgtctcctgccccttcctcccctggaaattcaggtctctccctgcagcctaattttaaggcccatttttctgcttccagcccacccctgcccttctaccttcgacctcctccctctgcctctccctctggtgcactggcaaatgggacagagagcctcggtagggccttcctcttagagtcttgcacgcatccctcagtggtctccctgtggctgcttcctgctgccaccaacagatacagacccctgtcgcacagatcatggtagagacagtggtgagcaggaccagacagctccagggagcagtgagggctggcttagagaacctctgttaaactgagaggccaccatcaggaagctctgatccaagatccaggaatccctgactctagggaaaggcctccaatgagagcctgggccctctctgcctgattctgattgtggatgtgccctcaaactccttctcatcactttgttccatccctctttaccctgcagcagctcccacaccctgccaaacaggatgcacagtccagggcagtgtctgagaaagagcagagatctgtcttcatggaaatattgatgtggctctgctggggagcaatggatttatcaagatcaaagttttcctgggagttattgatgcttaatttggaaatagacacactgttgatccctggtatctttagcaacaaagttaaaatgtttgtttttcttcactggttgccatctgagatcttgccggaagtacacaagagaaccttaaatttaacaggaggccctgggagcccatgaggctggcgggcttgggtctgaaatcttttcagtctcttgtaagtgatgagctctcattctctcctgagagctctacggtgccatgttttccactggccttttctgctcagtaattgctacattacaggctgttggtaagttcggaacaagggagctgctgattccatttctgtagcagagaacatgcaccgtgagacttgttgtaccagttcaggttttaggtgctctatttattcttgccccattcagaatgctctcccctgggtctgtggccacaatgctaagagtcatatttatgggcctgcagttgtaattgggccccattctgttcccccaagtggaaagatgaacagggtgtaagcaaccttccctgtagttagaaaaacgtttagttggatttatcagtctgatttttcactcataaacaattgcacaagcctttgcaagcccagagggtcttgtaataatgatggccgtggtccattatggcacagtgatgtgttctacggtggtcattttgctggcaatgacagtcacctctgaacttctctttccaacagacacaatttctcggggtttactttgtctcatcccaagagttccttgccaatgcctacgtcttagctgtgcttctgttccttgccctcctactgcaaaggacatttctgcaagcatcctactatgtggccattgaaactggaattaacttgagaggagcaatacaggtacttggatgattattttttcactttgccataagaaccattattaggaataatgtccatgagtgttattcatcctcatggacactcaagaataattctgctgtaaatttattttttgttgcccattaacgatgttttaaaacagtaaccattgacaaggcagtgtgggatagtggaaaatatcttgggctgaacttgggagacagtgtagctctggctctggttctgccttggactgggtctgaaaatccagctgctcagcccttggcttgaaagtggtagacgtcactaattgatcacagcactctttctgaccaagggtaaatgcaaccttggaatcctctctaagtggctgttccagagttctgctaccagacagtcttctttgggtgtgaaaaaaggaatgtgcttgacatacaaggtctagatagcctctaagacagggtcccctctaagatggggtattggtccatggcctgttaggaactgagccacacatcaggaggtaagcagtgggagcaagcattactacctgagctctgcctcctgtcagatcagcggctacattagactctcataggagtgcgaaccctattgtgaactgtgcaggcaagggtctaggttgtgtgttccttatgagaatctaatgcctgatgatctgaagtggaacagtttcatcctgaaaccatccctctcccccaggtccatggaaaaattgtcttccacgaaaccagtccctggtgccaaaaaggttgaggaccactgctctaagttctatttgaacccttaagtcttgctcactaatgagagtgacctatttggtctgttgggtcacttaagtctaggctcttggtcctgccttctgtgatttccttcttagagtttctggaaagatgatcaaagccagggagtgttcagggcccctctgaagaaggtgatgatgagagttgtccaagtcccagggtcttcactaggattttggttcagctatcagactagagagacatcctgattgagagtagtttaaatgggatagaagtttgtttattcttcagatagagtcagggctgacacaggagctactcaatgatcagagacctggcttcttctgtcatgttgctctgccagccttcttttgtgacttttgtctccatagccatggtgggtattgaaactgccactatatttacatttaaactagccagaagaagggacaagaggagggaacgcattttccttttaaaatggtaatacctgatttgcacataccctctcgcatcccattggtgagaaagtggccaaatggccgtatctagagagtctagaaagagcttggtctttattcttgacagctatatatgcactgctagaaattctctgtgcaaagaggagaatgggcattgggaataactagatgcagctatgcctagtgatgtccatgaagttgtggtaaaatcctgaagctaccttgttctttggaaatgttcctcagaatcattaacattagtcatgtgggagacaggagaagaagctctgcagaaaagggaccgagaggacaaggatatagcttgggctggggacaatgtcagagtccaaactctggctatcttggaatagtctgtgtgaacggtgccctcccaagttgtgcagtgcacaacctgtgcagctatatatggcaaccctgcccatccccagtggtttctcactgggaaagcagagtatttcctcagggatgtcattatgtgacaatagtggaaaaagcccaggaaaatctaagaccttctaagactcatgggggcccagagctgggaggaaccaagctgttgctcagttcagaaaacttctctagaaatcccagcctctcctcacacccctccagtgacaggcagacttgcaccaccacaagcaacagccacttttgtggttgggcagttttgtaattaaatatactaatgtgtgtatgtcataaattacattttccaattatgccaaaagagccaaaaatggttttttaatggttagcatataatcgtttttatcaaattgcttgaatctttcatgttaataagagagattcattactatgccacaaaaagcaaatactggcattaattatagaaacaaattaggggggtggagcgcaatggctcatgactgtaatcccagcgctttgggaggctgaggcgggtggatcacaaggtcagaagtttgagaccagcctgaccaacatagtgaaaccccatctctactaaaaatacaaaaattagccaggcatgttggcgtgcacctgtagtcccagctactcaggaggctgaggcaggagaatcgcttgaacccagcaggtggaggttgcagtgagctgagatcgtgccactatactccagcttgggcgacagagtgagacttcatctcaaaaaaaaaaaaaaaaaaaaagtggctcatgcctgtaatcccagcactttgggaggccaaggcgggtggatcacaaggtcaggagatcgagaccatcctggctaacatggtgaaaccccgtctctactaaaaatacaaaaaaaaattagccaggcatggtggcgggtgcctgtagtcccagctactcgggaggctgaggcaggagaatggcgtgaacccaggaggaggagcttgcagtgagccgagatggcaccaccgcactccagcctgggcgacacagcaagactctgaaaaaaaaaaaaaggaaagaaagaaggaaaggaaaggaaagaaaggaaaggaaaggaaggaaagaaagaaagaaaggaaagagagagagagaaagaaagaaagaaagaaagaaagaaagaaagaaagaaagaaagaaagaaagaaagaaagaaagagaaagaaagaaagaaaaagaaaagaaaggagttagggagaaaaaaaccctttctttctttcttttggagatttccggaaaatgtacccttacggatgagagcctgtgtcttcatgggttagagaataaccacgctttgtgcataaaaagttattaagcacaattcctgaattatacataattactagctgtcagtcagttgtgcatttctgtgtatgctggtcttcacttaataagactttatttcacagatcacttggtgtccctacttcactgaaactaggtgattatcttttgaagtctcatttcacataacctaggaggtatatagatttctttaaaaatgtcattgccattattttaaaccttacccatggtatatataaacttacagaaagacagaataggttcattattttaaaccttgcccatggtgtatattagctcacagaaagacatagaataggttcctgccttaagaaaacctgacccacaaaaaagcctgggtttacacaaaagaggaattaagggcggggagcccaccttacaacagaatgaataatagaattttatccaagagcaggcatcctgaggacatttaagacccggatgcatttttccttgttcaagagcacacatccaaaaattgcagtctttctgcgagtcatgatcactctgcacataaagcgtttaggttcagagctcggggaggccattaccatggctgctctctgtctgccctgtgagggtccttggggtggctgcactctggggatggtgctggggctgactgactcacgcggtcgtgtaacacatcagaccttccaaagtcgaacccttgttttgtttcaaggctcaattatgacaggacttggtctcagagcagatcccctccctaggctggagaaggccactttaaaacagatggcctgccccacttcatcatttttatggctctgatctgtgttctccactggcctctggtaaatcaagaatacaagtggacatgaagatctgctttaaaaaataaagaacagaccgggtgcggtggctcatgcctgtaatctcagcatttggaggccgaggtggatggatctcctgaggtcaggagtttgagaccagcctggccaacatggcaaaaccccatctctgctaaaaatataaaaattagctgggcatggtaggcacgtgcctataattccagctactccggaggctgaggcatgagaattgcttgaacccggaaggtggaggctgcagtgagctgagatcatgccacttcactccagcctgggaagcagagcgagactctgtctctaaataaataagtaaatgaattaaattaaataaaaataaagaaccaattaagtcctgtctacaggaaaaggccttacttgctggagaagtagcttgctgtgctggagtagactagtaagttggaacggtgatacagtaccaccttacagagctgctctagggcaccatggggactgtctgagaagcccctggcacactgtaacaggtggcatctggtgtggtgatgatgatgagaatgatgatgaatgtgaaacactctgctctcatttctagaccaagatttacaataaaattatgcacctgtccacctccaacctgtccatgggagaaatgactgctggacagatctgtaatctggttgccatcgacaccaatcagctcatgtggtttttcttcttgtgcccaaacctctgggctatgccagtacaggtactagatgggctgaggggaagggaggggggcagcaggacacacaaccagaatctgctggtccatggccagtaactaggagcacaccgtcttccactccatgcttgcctgtacctttcacacacttggctataccacaggctgtacctctgggtccctcctgtcccatactctgcaagcactgaccatctctcttaatgaccagagaaggcagtatcattaagactttaaaaatggagccaactttataaactatagaaaaatcaagccaggttcaggggctcacacctgtaatcccagcactttgggaggctgaggcaggaagattacatgagcacaggagttcaagactggcctgggcaacacagtgagaccccttctatgcagaaaaaaaaaagaagaaagaaaagaaaaatcgtacatggaatgcccacagatcttaaaagctatgttgtagcaaaatatttaattacatcaaaaagtgttagtgatgtatttttaagcaaaaagagtaagttacaaatagtatatgttgtatgcttactactaaactggaatatatgttatgtatacatttgtacagattcacacatgaaaaagaattggaaaatcacatagtgggattataagtgatttttattttctttatgtgtttctaaattctctaataagcgtgtataagatttggaaatcaacaacatgatacttttagcctaggcaacaaagtgagaccctgtctgtacaaaaaattagctggaagtggtggctcacaactatagccccagctactcagaggctgaggtgggaagattacctaaagtccaggaggcagaggttgcagtgagctacaatcacaccactgcactccagcctgggcgatagagtgacaccttgtctcaaaaacaaacaaaacctggtgttttttagccagatgtggtggtgcgcccctttagtcccagctacctgggagtctgagatggaaggattgcttgaccccaggagttcaaggctgcagtgagcaatgatcacgcccctgcacttcagcctggacaacagagagactcctgtctcttaaaaaataaaaataaaaacgttaaaacatggtatttttttaaagcaagacaacctttggtgctggctcaggaagaggtacattaccccccaataatcagaggagaatcgtcagcatgattgatctgacctcgggcttcatgtgtcccatctcccacccggagctcttccaccacagagtctgatcctgtcctatgcctgggactaaatcttcaccctggtgttcaggccagaaaccgaaatcccagacccattcccagagggcgggaaggttccaccgggagagcttgatgtagcagaaagtgacttgggtgagacaggctgattcaaatacttaacctctctgagccttggtttctttatctatgaaatggggaggctgcccaccctctggagttgctatggcaattcagttagataatgtaagtaacacagcaggcagagtggcccccagagtcttcacttcgtaaatatcagatccctctaccttgcacatgtttggtatgagtgaggtgttaccaatccagaatccattgcttcttgggataaagattccataaaccttcatctccagtgatttgtattggtcctccttacttgtaaagcttagagtttaaaaatattaaaagaaaaaaaggggagaggctcccacagggacacagctagacaagatgagatgcagggaatctgatgttcttttttatgggaacagtcatatatgccatcccccattaccacctacccatgcccagactgcccccgctccattctgccaagacagatcaatgactataaaagctacaaaagggcctggagatctcatctagtttagttaccaaccaaccttttatgcacaagactttctaagctgggtgtggtggctcatgcctgtagtctcagccactcaaaaggctgaggtaggaggatggcttgagcccaagagttcgagtccagcctgggcaacatagagagacctcatctctaacacaattttttttttgaaacatgaaaaatgaagatttctgaccatgcttctctcattagttaacactttgggctgtgagggtctgatgcagagagacacagcctgggaggatcctaacatgtacacagcattcaaaaggctacaagacactttctgttgtgtccccttgaacaagcagtttgtaagattttgttggccaggcatggtggctcgctcctgtaatcccagcactttgggaggctgaggctgatggttcacctgaggtcaggagttcgagaccagcctgaccaatatggtgaaaccccgtctctactaaaaatacaaaaattagccgggcatgatggcgtgtgcctgtagtctcagctactccggaggctgagacaggagaattgcttgagcccaggaggcggagactgtggtgagctgagatcgtgtcactgcgttccagcctgggtaacagagcgagactcggtctaaaaaaaaaaaaaaaaaagaaatcaggttttgtctactaaacctgctgcacggttaccgttactagtactcacagggtttgttgcacatgcatcgttgctaatagtgctaactaatattaacagcccttgccctatgcctggccctgtcccagcccccctcccttgtataatttaacccttgcactgggggtagagattttcatatctactgatttcttacctttgctcatttatcatggagtgtcctttggttttctgtgtttgtatatacctttaccacttatagatttgaccagcactcaagaaccagtgttactcctgggagttaatacaatcccagccccatggcaaagaaactcatgtggttaggattctgtgtgcagcctggttagccacagggcacgtaaggctttttataatattgacatgagtgcagaagccccattcccgtgtaagccctgagggctcttgtttcataatctttttttggtcacatgcacacagctttattgagatataacccactcatttaaagcatacaaatcagtgggttttagtgtcctatattcacagagctgtgcagccatcatcacaaatgtggaagttttcatttccccaaaaagaaacccgtacccattggcagtcactcctcatcttcgcccccagcccttggccaccgtttatctacacatacttttgaaaggctagtgaaactttctcagaaaaataaatgcttgctcaaacatttgggctataatttcaggggcttcatgggtgcccccctgacatttatcaagaacaccaggttaaggaatttagctataatggaggcctctgtgtttcccagtctcctgggtatcagaggcccagagagggcaggtgccttaccctgggccacgcagtgaaccagtggcagcaccatactcacacatctcctttctgcggttccccagtgacagagttctcaggaagctttttcatttattttctgagaggagggtaggccatcttgtattgatctccaactatatgccagccacaattctaggtgcttatcataaaggttcatttaatcttcacaatagtcctgcagagtggacagagtccttcagagtgggcattataatcaccattttaaagatggagaagctgaaaaccagagaggttaagtaactcacccaagactgcacagcaaaaggctggggctttgaaactcagggccacagactccaaagactatgtcctccccactatgctagatttttttcctaacctgtgaataggagacaaaatagtccttttatttctcacagttgctttgcacactcagaatccatgatttcttctgcatgagggccattcagacctgtgcagaagagagtaatggaccaaggagtcttgggagcacctaggaggaggggatgggggagcatgaggaggagccagggaacagcagcagctgcagcaccagctcccaccccagcctctgccagtctcttggaggtggtgtgggtgcagacaccggctcacaaggtgccctgttagtgagcttggggtgccatgggagccttcttgttgtcaggcccaacccaagctggctgaagaacaccctgatggcctccatttgagcacaactaatgaaggactggatgccagagataagtccaggagggtgatgctgcagggcaggccagggaagagggtacttcatctctatcatggtcctctgcccatccatgccagcatctaacacctgttaaacactgggaggcaggtggtgaaggggccacttcccagcctctaagatacctcctaagccaggaggcattctgtgattaaattacagggcctcccacttactcctttatccttgaggcggtgctggaagcttaatgccaatctggtgtagggctctgggactacaggaccaaggcaagcagtcctttctctctctctctctctttttagctaaggaagccagcacatctgttctttgagaaaaagccctgtatttagaggtgtctgcctttgaaggcaacctgagaaactgtcatcttggcgctttggggactggccatttacacttctcataaatattcagaagtaggcagtcatttacataaagctaaatgcagaaggaattctcttttcagggaatacctggcagattcattaaaaaaattaaagaaaccaagagcataagaatgaaaagcgaattctcggaccccaggctggttttttctggcatgggtgcagtaactttgcctctttgctcagttatcacttttttccaatgacagtaaccataagccctgagagccagcaaatagaacaaaaggtgctgtcacaaacattgtgcaatctcatctctgagatttccatctggaaaatagactggagagagttaaggcttcaaccagccttgcagataaatgcagttagttaccagcccagcaaccctctgcttgcatgagagcccattatgctaacctccttttgaaattgctttgtttctcctccttccctgcactccactccccaagataatttggaaacctgggcaccaaggcttgtcccactctaggggactggggaaacagggattttgccagcacctcctggcagggcaaccatcaggtcaaagggacctgacccatgaccccttcctcagatcattgtgggtgtgattctcctctactacatactcggagtcagtgccttaattggagcagctgtcatcattctactggctcctgtccagtacttcgtggccaccaagctgtctcaggcccagcggagcacactggtgagtgcccaaaggtgtgtgtgttttgtccctcttcccctccttccctcgacagcagcaggtctcctcccacacacccacactgtcattgactttgactttgactttgagtaggccacttcacctgtccaggcctcagcttctttgtctgggaaatggagtcaatgggggaggaggctgcctcccggtgaggacaggaggcgggcatggcagtgacagtattgacactcaggccttcctctcgggtgggagacggagcagaagcctctcccctctgactcggggacccctgcaggagtattccaatgagcggctgaagcagaccaacgagatgctccgcggcatcaagctgctgaagctgtacgcctgggagaacatcttccgcacgcgggtggagacgacccgcaggaaggagatgaccagcctcagggcctttgccatctatacctccatctccagtgagttcaccccacacagccagccctgggtgctgctgcgtacatgcaaggagagggtgtcagagctcgggtaagagggggtgcagggacagaagcaggaggccttgagattatccgactcagtaggggagcctcaaactggctctgatagctaagctcccagaaatcaaagtactcttcattcatttatccaacaaacatgcatggaaagcctgctatgtgctggacactgtgctggccctcaggatacagtgatgaggaagagagatgaagtttcattcctcatggaactgatatgttattgacagacagcagcaagtaagtaaatgaccacagttttgaactctcctaagaatgaagactttttagtaagtcagactgagctgtcattgccctggggaagctacaagaaagcttccatccacttggggctatgcaaaagaaaaagactagttatccttaaatatcagaagcccaggctgaaggtactcacaggtgtagggactgaatttatattaaccaagtagtttgggaaccccaagccaaggaagaagaaaaagaccaaaactggtaaaagtcctagagtcccatatacttgaaaccattttactgagaatgtaaaacttttttttctttttttgagatggagtctcgctctgtcacccaggctggagtgcagtggcaaaatctcggctcactgcaacctccacatcccaggttcaagtgattctcctgcctcagcctcccatgtagctgggactacaggcacacaccaccacacccgactaatttttgtatttttagtagagacagagtttcaccatattggccaggctagtcttgaactcctgacctcgtgatccacccgcctcagcctcccaaagtgctggaattacatgcatgagccactgtgcccagcccaaaagattttttagaaattgaaattttagttatggaaattaattcagtgaacaatggtcccctggtcagagtgagggcttacggaggtcaggtgatccatggagtcctggcccaagtttatctcacagttggtctcgtggctccgtggacccatcccatggtggttacttcccaagtgcataattgggatgtagatatttagcaaccagctgacttcacactagttccctgacctgtccagtctaagagtcattatggccaagtggaagcccctggaaagaagaaaacaaaaaagaaaccaaaacttactcagtgcacaggttacatgaatgagtatagctgaagagagaatttttgaattagaagacagatgagtggggattacacagaacgtggcaaggagagtaagttggtagaaccattttacagatgggaaattaaggccagaggggagtgtgttcctgagatccctcctgaggttagtagcatggctcggactagatcctccaaagtctcttaactcctggtctcaggctattttccacaaagagctgggggcctctgtggggtgaagaagacttaggacaccatggggcaccattatgaggccatttcctcctaggagaaaaaaaatctctgggctctgaaaggagtagaattagggtaggaaattaagagaggctaccgaccacctcctccaactaaaattggttcttttggtgccaggaagagacacacctggtgggggagggaaggtggtaatggagggggtgctggtagtgtctcccagatagacccatccaacaagtctcatggagaatgagacggtcactcaggtcatctgcgtattcttggcattcttgctgcctagagagagagtctgatggagctaggtggccaccaagctgtcccactccccaagacagtttggaaacatgggcaccaaggcatgtccctgtctaggggactggggaaatatcccatagcagtgttctcacagtatggggctggccatgaataccccaggagtccaacctccctttgtccagctagaccatggtgtcctatgcctcaggcagggaatgtggtccagtcatcagtggctgggccgtctgccatacatggtgcaagccatggcgttttatgcagaaagtcctgctagcatttgattttctcagaatggagctgtgagcatggcaggcaaccactgtttcctggattcttcaccaagacaccccaagttcctggtctctccccgttatcctcatccctgaccctgtggttctcagagcctccaaacacactcaggctaagcactccatagacaggggaaatttggaaggaacatctagggagctcagaaaagccaatgtccctagccccaggcccacttcaaccttctctctgtcagtcctgcctgcccctggaggctggttacatgaagagtaaccccctgcttgtgtatagccccccagttttgtacaggtttagagacagttcccagcagtaggaacagctgccgaggtgggagagggcttctcccgatagccgggggacttcctctcccaggaacaacagggtggggtagagcaggcttgtcgttgctgagatagagagagggaagggaaacaacaaggaaagtgggggcactgggtccccaaggttcctggcacagcaagcagtgaagttggggcagcctcaggtcatgtagtgggggcaggtgacatctgctttgactgctcctaagagatatgtactcatctcctggattccaaactgcagcctgggacatgttttcttatataaacagcatcaaaagatgtgtgagttcccaggctagcccactgaaccctacctagtgggtgctcattgtcccccagagcccccagaagacaagccgtggctttgtgatgggcctggggccaggaggacctagggatatgttgtgaagagctgagaagactctggaaaaaaggggctctggagccaagcaggagcccgcccaggactcctcacgtgtccaagtcacctagggagagaaacagagcagcccaggttggtccctggaagagagcagcggaggaggggaaaggggagagcccctggggagagctttgaaagtcaagtgctgtttgctcagtgtgtttgcctttccgaggatgtgtttttttttccctccgttagtcagcagtgggagggggagagagacgggtggtagggtgcagggtacctcctggctgcaggcatatgctttgagtgcgtgttcatttacctcctctggacttcctgccttctgttaccagggatcaagacacaggtcattaggcgtgaggtaatggggcatctcttgttctgacccctggcgccagtcttggagtcctgacgctgcagaggagccccagagtcacatttcctgttggggcccatcctgctcatatgcggcaccatcagacttctgggcaggcaagattacctgtgactctgtctgatggtctcgccatcaatatcactgagagtagctgtgtatggagtcccgaactggtacaggataaaacagggggctgaaaagggaatgaatgggcacagtttctctggcatcaaaagtcacatccagaattgatatttcctgttgagtaaaaatagaaatataagttgctcagtggatgttgagtgagccctattcatgtgccccactctgtgccaagcaccaggaaggagggaagggaaaaatgataagatgttctccccgttctccaggagtttatgctccactaagaagtcagagctaacatgcacagaacagtgtggcagcgagagcagaaccgtgtggccagctccatgcttgccgcctagcaagcgtgattgcacttcatcctcataacaacttggtgaggtgtgttgctctgttgtcccattttacagcagagaggactgactctcagtgaattgaaatgtctcagtgaggtcttccacagcaaaaggcgaagcacagagaaggaagtccatgtgggctgggagttcacccagagattcatgtaggggcaatgtgggctgtaccttgcaagatggtgggatttcaatgaggagaagacaaagtgggaggaagctggagacaaggactgtggtctcttcctttagaagtcagttcaatctttttttccttgtggaagcagcataactctaggtggttcctctgtatctgaggacaagctttgtagaggtgacaaaggggtcctaggtcctatcaggcaagcactcgatatgctgccagttcattctgtccattgtgagatacccattccagagcgcttcctctgtgccaggctctacggaggttctggatgttaaagaggaagcaggcatggccctggccctcccagtcttgtgggagattgatcatgcccatgaatagtgaccatgtggtcagagccacagggtcaattccaaatgcccctgtttctcttttgtgttactcacctgactctgggtctttcgtttcttccattcattttttttaaacaaatatttcctgcccaccttctgtgtgccaggcctggggatgcagtgggagaagcctctgtcctcctcagtggaggcgctaactcagaacaggcagtggagaaaaacaacatgacctggagacctggtgccccttccttccccagcatctttgaaattcttttggttgttgttgttttgagatggagtctcactctgttgtcaggctggagtgcagtggcgcgatctcaactcactgcaacctctgcctcccaggttcaagtaattctccctgcctcagcctcccaagtagctgggattacaggtgctctctaccatgcccagtaatattttttgtatttttagtagagacagggtttcgccatgttggccagcctggtctcaaactcctgacctcaggtgatccacctgccttggcctcccaaaatgctgggattacaagcatgagccactgtgcctggcctgaaattcttcaatatctacctgcccttctgccagttggtgcagccacagtgggctgcttatgcatatcctggcctggcttggtggggagcatggctgagggagagccggggcacccatcaattaaggaggtaaagatcagtctgactgagatgcctcctgccacacttcctcagctgccagcaactgacaccattaacctgatttccttccccctctgttgactgcactgactattggactgaatgggaaacagccccgtgcacctcaaaatgcacttcccctcctgcagatgcatcttgcaattaggcccaaactgtgagcctgcatgctcctcccctggccctgcacaggcaacaaagctgaagttaatcagaggtacaaatggctggctatgcctctctgacacgtaacttctggaacatgtatcaatgctttggaaatgaaaagctcctggtattgcaatgccaggctggtgcccataagggccagaaaacattccttgggcaaagccagggggagtgggtgatctgatcccagctcaggtttgttgatttgttgttttgtttgtttcgttttgtatggggcaagggttgagggtatgaaaaacttacactatcatttactaccgtagtccccagaacccagcacaccagcacaaggcctggaacagggataccttttttgaatgaataagtctttttttttttttttttttttttttttgagacagagtttcactcttgttgcccaggctggagtgcagtggcgcgatctcggctcactgcaacctccgcctcctgggttcaagcgattctcctgcctcagcctctcgagtagctaggattacaggtatgcgccaccacgcctggctaatattttggtatttttagtagagatggggtttcaccatgttggccaggctggtctcaaactcctgacctcaggtgatccacccaccttggcctcccagagtgctgggattacaggcgtgagccactgtgcccagccttgaatggataagtcttaagggatatttttggaaaggatattctaaaaaatacccatgtctctacactattgcagaagggctttcagttttgatggcagcctttcaggccagcctacacgcaactaaacttttccataacagcatcacacttacacaagaagaaggttttataatccacttgccattatttaacatagttcttcctccttaactttcaagatctgagcactataatgttcttctttttgtttttgtttttttctaaatcaaattaaggtgagtcacctcaccttgggcctgagttggacagaaatctattcttggctatattccccacccctccaccaccttggaaccttatagaactttatgtggttcaggaaaatgagggcgaggcctcagatcttcaacccatgacagctgtatgcccagctccctgccttcctgtcttacccccagctagggcacaggactgactattgtgcccagagaggtgccagagcctgtaacaaccccagacttcccaggtccagccacatccaccccagagccccaaaagatgatcttcagagagacctttaaaacacaagtagctggtcacttccatccagaccagaacccaagatggctgtgctcttgctgagacatgttggttgtcattgcctccgagcccactttagccctcagctctgtaccagaaatgctgttcctttgggaatcacagccaaagaagagatggagcagttctggaataagaacacaagttcaaactgtcccatatctccccacatcactatctacagttggtctcttcccatggcgatgtccatctgccaccgtggcactggtattgctttgagtgcaggggtctctctttttggcatgttggccctgttactccctgggaactttgagtcttatttggaatgcgtgaagtccctgtgtccggggccagcactgatccacacagctaagtttgcactcatcttccctctcatgtatcatatctggaatggggtctgacacttgatgtgggacctaggaaaaggcctgaagattccccagctataccaatctggagtggttgtcccggttcttactgtactgtcctctgtagggctggcagccatgtgaagaacagaggttcccagcatcatcttcctacacattattacattcacccatctttctgtttctcacttttatctccagcctgggaaaagttctccttatttgtttaaatccttttgtgcttttagatccccttggagcagtagagtaccttgtagaccataagagtggaaaagggtctagttttctccttgtttctaaagatggggtggctgaaaaaactccccttttttgcctacagcttgcctctctgggcctagaagtggttattctgtctccatattggcctttgatttgtgctgagggtcagcttttggctccttcttcctgagacagtggaaacaatgccagctgtgtggcttctgccctgggggctgggggtgaggctttgggtgccactgcctgtgggttgctggcttaaaggacaattctgttcattggtgagagcccaggccattaacacctacgcagtgttattgaaagaagagaggcgggggtggaggggaattagtctatcccagctagagggagataaagagggctagttagttcttggagcagctgctttgaggagaaaatgtatagcttttgacacaacaggaagatccagaaaattatcattgaacatattaaaggttatttctttttcttgcaaaacacacacacacacacacacacacacacacacacgcgaacacacgcagctgatgattctactctcccagccccagccctgaaggggacccagaactccctgcacaaaggctgtccttcaaggggagggtgaaagaagtggaaaatcacattttcattctttagcgtctccatacaacagccagaactgggcagaagctaattatatcagaagcatactccatgttgctgcatcagctttgggatgttcatttttaaatttatttatagcttgtctcattcctcaaaggagttcagggagctacaaaaataaagacaataaaattgaaaaaaattaaattaaaaaaaccatgaccagggaaaatgtgcagtagaatgaagtgtcaattatcacgttttctgactgcaaaatctcccccacggctgatgcaccatcatttactacaacagcccctcttgttggacatttccagtttatttcgtttgggatggtttgttgctgttgctgtggttgtggttttgttttattgaattttgtgttagctgcagctaataccatcttgctgatggctttgcgctgctcttgaatgattactcaggataaatttcctggagacggattataggatcagaaggtctgaacttctgtgtggctctagctacaaagcaccagattgctttccaagagcgttgtagcaatttataatccaacactcagcctattttttggctgggagtcaagccccagaatgtgaaggaggggtcttggcctggagcaggggctgagggatgggtgcacaggacccctccttattggttatttatggggatgggccaggaggagcagaatagaggcccctgccctcccagttgctccttggagtgactgaccccataggggaggggcgaggctacctcacatttagaactatgtagttggtgatggtcaaggtcctaggtctgatgggcatcctcctccctctcctcctcagccagtaatggctgcactatgtcgtatgtcctagatctgggtcccttttgctgtgggaacaccaataatacttacgctgtttcctgccggaaacggtgcaggagggctgtggcatggtagtgggccctggaaaccatctagccttcatgaggaagggcagttaaagcacaggcatgtatgatgttggtattgattaaaagcctcacgggcagagaaattcgccatctgccagggccccagccatacgagggctccagccatacatcctccaggagactgggacctctccaattgcaggagccttgccttccccatcagattaggaattccccgaggatggggacaatgtccttcccacctgcttgagaactcctaaggggcatgtactctgtctccccattgtatctggaacttcctgggagcatagctcctgtctccgtcctcagactgggaatcccctaagggcagaggccatgtccttccacccacttgggattccctgaagttggggaccacatctctgatgtacaatgctttgtatgtactgactgctgcaggattcttggagtaaatgggcagtcaacttcttggactggtattgaccatctggacttcatcagagtgtccaagactttgccattcattagacaggggccatgtgcacaggcagagccctggcctctggcttctggctcctgactcctggtccctctgctttaatttggctaatggcagaaccagactcctttctgggctgccctggaaggggatccttgaatgaaagaggatagatgggaaggtggcagctgacatggttacctcttatgccatgggggggctgctctctctggaaatttaggcctggggtcagggcactgttgagcattttacaccctaggccagaggaggggtgacctgtggagcagggctaagctagtagcccatgaggtatgatgtgtaggcagcacctggggctcacagagcctgttacccatgttatctcctctgaccttggaaagagctggggtgtatgaacaagtatttataagtttacaaaaatcatatgaggaaactgaggcacggggaaggtaaatgacatgccctaggttacacagcttataagtagcagggattctgcccttctgtcacaccaagtcccactgtcttttcttcctggagtccctgtgactgatctaaaggccacatgtttaacagaataaggaggaggcctctgttgcagcaaaccagctaccccacccgcacacagactctaagggacatcctgctttaagctgtccttagttactaatacctcagtgagaatgagtttgaaattttctcaagagccatgggagactaggaagtctctaagcttcatagagagcctggcttggggggacacaggagccaaaggcagaggaagaagtggcagctttgtgcccccagaaacacgtgctcctgacctcacagttggccacagccagccaactctcccatccttctcccaccactttcccgtggggctaacttcaccctgtccacacggagtgacttaacagtttaagccccagagtcgggggccggggtacctgggacaagagtcctgagggaaatggggtgaggaactggaagtgccacagggctagagttctgcccctagcctactggagctgtgccccacaggctggccccactggactgcgctgcctccaagccatcctgggcatctccatgtgtagctgtcacgctcctcccactaaacgcctccctgtgcttcctctgcagttttcatgaacacggccatccccattgcagctgtcctcatagtaagtggatcctttctccatctcttgggggtagggtggagggggagggcgtctgcagtgacaggctgcccagatttggcctttctgcacaggggcctcagaagacaggctccacagccagactgaaaataggatcgaaagtttatagagggtgtggcccctccccaactccagccgaacaggggcctctgcctccaggcctggaagaccggaggcttagtatttagagaaattaaactttcttttaaaaaatagctatccaaatttttaatttttaaagtgaaacatgtgtattgtagaagtgatgggaaatccagaacagaaagctcaaagagaattaaaatcacccataatcccactggtaacatttttaatgtgtttctttccagtctttttttaaggcctatgatatgtcattttctacaaaaataggaatgtgctatgcatgcagttttgcaacctgctcttttaaatttaggaatatgccacacacaattctccatgccactgaatattatgatggtggctttctaaagcaattttgataaaagctgtgtgtgagctgagccatgggggtcaagcagcatgctcctacagaaaggcctgggcccctacgagcctgcagccccctcacccagcctcccatccccatcttctgtgatggctgcagttccttaaaaagatctgcttatttcccccggggccagtgtccctgagctgtgtagagttcacagcctgtcggatacacttgggaattcacttccaatgtgatgtattgagctggttcctggcctggctcctgggggaactgtgggtaacagaggccactgagccagccaggtggctggggcaaagcactgtgcagtttcgtaatcactctgtttacgttatcccgatgaggactggggagatgagcaccccgcctgctgtctgcagagggggccgtgctgacctaacccgagatctcctccctgcttattcccagccaagactgggcaggacagggagtcttggccaggacagggagggagcagcccctgctctccagcttgaagtcctgaacttgttggggacgtttccatgagatgactgtggggatgatgaaggtgtctccaactaaaagatcctcttaggagcctgctccctgacagccctctcatttcccttccagtgctgagcgtttccagtgtgggagggacccacaccctgggccaccctggcctcacttgtgcctctgtccacagactttcgtgggccacgtcagcttcttcaaagaggccgacttctcgccctccgtggcctttgcctccctctccctcttccatatcttggtcacaccgctgttcctgctgtccagtgtggtccgatctaccgtcaaagctctagtgaggtgaggggagggtccgggcgagggcactgggcaggcaggtcctgtgtcagcctcaaggcttgctcgagtgatggccaaaccacagctgtttggtcccggaacacacccccattgctgggccttgctgtagctggtcctggttggtcagagggacattggcctgtatggtttcccagctcgccatccctgagcaaggacttgcttacatacctcccaggagaggggactcactgtcactttcacgacaacttaaaaaaaaaaaaaaaccagtgttgagccaaatgtggaatcctcctaaattctacccactggtcctaacttcaccctccagagccaccaagaatgaggccatcccgtccccacgtggctgccccatggatatcagaaggcatccactgtgtctatctttcccaggccaagtatcccctaccctttccacagcccctgagccctcacagcctcagccagtgaaacagcttcccccaagcgctgggtcctgctctgattggcccacagctcttggaggctcccacttccaggctctagagcctcatggggactctgccactgtcccagaggcattgccctcttgggaatgaaagcctgaaggtagaaggctgaggctttggctgggaaatgccctgtctggagtgagaagatgtccttgggcctctgaagtagctctgcctccttgaaagcaagagcctgtcatgcctctatggagggctggcttgtccttacccatggccagagaaccagtcagtaacaaatgtcctctgtgtcttcagccttgaggaaggtgacacccctgtctcatgggaccctggcaggtactgggaagctggaaggaaggagtagctgttggaatgaagtagctgatagagagggtagcttgcagggggagactctagcatgggttcaaagatggaatggggcataactcagcaaaattatgctctaaggagtatctgaccaggcagtagctggttaaacagggattagctcccatttccacagtcggctgtgctgactcagtttcttgaccagggtgttgtggggtctgaagatcacccctcctcccaccacccactctccagccctatgattctgtgtagaaaccacagatttaagaacgctgcacctgcctgaaaactgttgcactgatcccaaagcgttcatattttcaaacactctggatcccactgtttccaggaatggaacaccagagtagcagaggccttttcagtgaggcagctcaggctctggctgaaggtgggcgcaggacactacctgaagcttcaccccaagagatgagggccagctccactcttcccagtcaccgcctgtgggggagggaggctggacagggcatgaaggcagagcctggtggtctgcccctcccatctaggggtggcgcacagaaagggagactccaggccacagctcacttacaccccagaataaccttgccttgagggtgggatggcttgtctgccccaggcctgttggacatttagcaaaagagaagaaaggggaatacaaacaatcctgagcttcccagaaagctttcacacctccaggatgggagagaatgaactagaagagtgaagcttccagtgcttcctcaggtccacagggaaatctggacaggggagagggtaggaatagccgcctcccccgtgagtaatgacacctcctccagcaggctgttatggggatccgattacataatgctacaaaacagttaacacagtgtctggcatttagtgtatgctcacaaaatactagctattgattctttaccaatcctagtcctaactaaccttaaccctgaccaatccaacaccaaccatccttcagtctaataacccagactaactaacttcaacattaaccctaaaactaaccaatctcacctccaatccagaccccagcctattccagctgactggtcaaccctagcaaaccctggtaacaccaattacctgcccccatgcccactggtctgcccccttcagtgtgggctttgtgggactatacttcaggcctgagatcctgctcagagctctctatcaggctgcgccctctcccctcccctctgcccctggcaggggtgaggggtgtctctgtgcttcccgagcagcgtgcaaaagctaagcgagttcctgtccagtgcagagatccgtgaggagcagtgtgccccccatgagcccacacctcagggcccagccagcaagtaccaggcggtggtgagtgcccggcctccccttgctactcccagcatggtcctctaaggcccaaaacttgggcctgctgtgtcggacttctgccttttttcccaggaagaggggctcccttccctacacagctcccagcccagtgggtcctcacctccaaaccacccccagcccctcagggttgtgaaccgcaagcgtccagcccgggaggattgtcggggcctcaccggcccactgcagagcctggtccccagtgcagatggcgatgctgacaactgctgtgtccaggtgagtcctgctgccccatgcctggccacccagcaccaactcccagagggagctcagcacctggaaagccagaaagctgcatgcttagtcctctgcagaggtcaccctgcctgcctgtacggtccataggagtccagaaaccagggaccaccaagtggggggacccccagccttaggcaagggtcagcatgagaaggccagtctcccactcccctgctctggaagtgatccaggggctggaatcagtgtcttttggctttcatggaggaggggaagccagagactattcactgggaactggctgcctttctgttctctcctgggcggtgggacacgcctaatgaagatcatgggaggctacttcacgtggaccccagatggaatccccacactgtccaacatcaccattcgtatcccccgaggtatggcccagtccacccctccagcatgcccctccccatgtcccactgaataacatagagataaaaagacaaagctgcatttattgagcacctactctctgctcattcttggtgtatgccctgggtatattatagaaggggaaggctacattctagaggcttccgtgtgctgggtgggagtgaagcactaaggacagggtaaaattgccagccttaatgtcaaaccatccattgcagacagtataggtaatgcacaaaaagatcagaagtgggtagccaaggaacgcaagtggaagtgatggggtttctgagaatggacaaaggccctgaggccatgaggcaggaggattttctggcagaggcagccatgagcaaagtatggaggtgggttggaggtgggacccaggatggtgtttcttgggaccacaaggagcctgggctcatactaggagcatgggaaaggagaagcgagtgcttaggaagggtggcggggcaggaaatcagagagggggaaggacctggggagccagaggaggatgttgatttccagaaggaaaggattaaagagggagaggacttgctggggattctaggtaggaagaaagaaaacaggggccccagggttgggtgcatctgtctgtctgtctttctgggtaatggttgttcagactcccccggccccactcacatctgccaccctccctccctgcaggccagctgactatgatcgtggggcaggtgggctgcggcaagtcctcgctccttctagccgcactgggggagatgcagaaggtctcaggggctgtcttctggagcaggtaatacatgtatcctcagggcccagtggaggggaaatctccttttaaccatcctcctcagttgaggatgcacacacatttattggagggcccactctgtgttcagtgaggactcaataaatgctgctaatggatattctcatcatcatcactagtacgtattcacctcttactatgcgcaggttctttgctaagtcctttgcatgcattatttcatttaatttttatgataactaacaaggtccatactgttctcaattctcatttatagaggaaggttaaactatttgtcctaattcacacagctaataagtggcagagctggaattgaaactcagttctgtcagactctgaatcccatggttactcagatgcacggcagtaatttcccagtgtgggaaattgcaacaccaacattggtttccagcttggtcctgagctgcactgacctacacaccataagtgggtgttctgaagatccagatgtaaccaataaatgttggtttctgggcaaagatcactgtcttaattaaagagccagaaccccaggctcagtcaatcacgaatctgttatttatacccacctacttccaagaagcacttgaaactagttgatgaaagattcatgtaaaaatcaaaaccacaatgagataccatctcacacccgttagaatggtgatcgttaaaaagtcaggaaacaacaaatgctggagaggatgtggagaaataggaacgcttttacactgttggtgggagtgtaaattagttcaaccattgtggaagacagtgcggtgattcctcaaggatctagaaccagaaataccatttgacccagcaattccattactgggtatatacccaaaggattataaatcattctactataaagacacatgcagacgtatgtttattgcagcactattcacaatagcaaagacttggaaacaacccaaatgcccatcaatgatagactggataaagaaaatgtggcacatatacaccatggaatactatgcagacataaaaaaggttgagttcgtgtcctttgcagggacatggatgaagctggaaactatcattctcagcaaactcacacaggaacagaaaagcaaataccacatgttctcactcataagtgggagttgaacaatgagaacacatggacacagggaggggaacatcacacactggggcctgtctgggggtggggggcaaggggagggatagcattaggagaaatacttaatgtagatgaagggttgatgggtgcagcaaaccaccatggcatgtgtatacctatgtaacaaacctgcacgttctgcacgtatatcccagaacttgaagtataataaaaaaagatgcatgtaaaataaaaccctttaaaaaggtaagaaaataggaactgagaaatgaagagggtaaaaagatgttcagcaacctgggcagaggacaactacagccatcaacataaaacctggctctgtgccctctggtagccaagggaaaaagggatctctgggctttggagtattcatttaggaataaaagttgcagccaatcagcagaagggcaagctttccctaccaatcatttctaggggaaaattattgaaggtgtcaggtttttcataagcatgagtacagaactgagcagggagaaagactttgggcccaatgtctgaatatcaacatgcacccccgtttcctgcatttccaagatgtccctgaatggtgtatccaaaagatggcaaatttccctcctcagtggggtcgtgggctagcagatgagccccttgggtttcccatcacctcccatcagggactgtgatgtctttgggggcagaggggtctttgcctccattcgccattttatttgggagatttttcaacatagcctgactgggaaggcccaggtattcggtttgagatcatattgccttattccgactgcctctccagcctttggagggaggagcccttttctgctgtccaactgcatgcctgcagcaagaagacaagagtccccagtgcactgtgagctgaagaaagtaaccaatatttattgggtacctcctatgggccatgccctttgctaagtgcattgtcaacatgatctcatcaagcctcctactaagtttaggaggggagtgttgttaccccatttcacagaagcagaaactcaggctcagagaagttgggtgacttactagtcagtgtgtggagcagagactctgcccatgttctttccctcaaacctggtcactgctggggcccccagggcctagtcctaagggttattgtccaagccccatgtagtggtcaggctggatctgggctctcctccaaggcagggcttttccagaaggattgcagggctcagacactggagctgcccctgccttgacctgctcagcatggatgtcaaaacccactctgaacctggtccctttgccctgctttcttctcctcccccaccctcatgccctcatgtggcatcgtgcctgcctcaggagctctccttgtcctatgtagatgaagcaggcatgattggcaggggtctgctctgccctgcctcagtccccacctcttctccaagctgtgccaaccctccgggtctgactgctgcccctctctcttaggaaacctctgccccagcccagggaacacaaggagcctctccaaggcagaggaccctaagcacttcttttttttattattttttattttattttaggttctgagatacatgtgcagagtgtgcaggtttgttacatagctatacatgtgccatggtgctttgctgcacctatcaacctgtcatctttttaagccccacatgtattaggtatttgtcctaatgctctccctcctcttgcctcccaccccccgacaggctcggtatgtgatgttcccctccctgtgtccacgtgttctcattgttcaactcccacttatagtgagcacatgtggtggttggttttctgttcctgcctaagcacttattataggccaggcactgtgcaggcacctcatcatctcagtcagtctgcaccgaactctgtgcagtagatattattatatcctcatttatcagattaggaaactgaggtgaagcaagttgtccaaggccacccagctgttaaatggcagaagtgggatttgcacctaggtgctcaagtgcattggtttgccaccatgtgctcaaagagaaggggcacaagagcctcatgaagaaggcatagctagcctgacagtccaaaggccagcagccgctgtggccatgactcacacacacctgcctcctcccagaactgccacgtgggtcctcacagctctgtccttatcaacacttactctcctttacaggtagcctaggccccagctcccagctctgttcgaggctcgcagaggggcggtagtgaaggggtctcatttctccaggatcctctttgctctctcgcccggtcctggtccagcttccctttcaagcatagtgaagtgcatttgttagcttgcagccaaccctgggaaatcatgagaatttgttcccaagtcaactcattctccagcgtccacagtgacgtattcactcacccagttgagcgcctagtgtatactagaccctgtgacagcaacaggagtgcaaaggtgactaagacgtggcccctgctttttttttttttttttttttttgagacggagtctcgccctgttgcccaggctggagtgcagtggtgcgatctcagctcctcacaagctctgcctcctaggttcaagcgattctcctgcttcagcctcccaagtagctgggactacaggtgtacaccaccatgccggctaattttttgtatttttagtagagacggggtttcactatgttggccagggtaatctcgaactcctgacctcatgatccgcccgcctcagcctcccaaagtgctgggattacaggcatgagccaccacccctggccggccccgcttttaagagaggggagagaagacctgggccttagaagagctcagaggaaccacaattgactctgcagtcaaggagaggaggctcactgcggatgtggtatttgagccttgaaggatgagtgtggtttcatcaagtagaaaaggcagggatgggaaagggaggtggtccaggcaggggtgatggtgtgggcaaagccttgctgatattaaagaacatagttctgtgcacctggaacactggatgcatggggtgcattatgaaagatgggactgaagaagtgaacttggcttagatcccatgtagtaggtctgagaagtaagatttaacccaaaggttgcaaaagaaccatgcttgtgataaaggatgatggattggggaaacagagaaaaagacagacagactgtaggaagggaggtattagcaaataatcataacacagtgtgaggtgtgcattaatattcactcattccaagtattgatcaagaagagaggtaggtactgggttaggaaacagcttgggcaaatgcatggggaaatgagagatgtcaagatgcattctaatggcagcctcttgaagatcttaagttgtttttggttcactcatttcgcaaatgaattcatttagcaaaagcactatggatacagtgcttacctctaggaagtaagttttagcccaaatgctgcagaaggatcatgcttatgacaaaggatgatggactggggagagagaaaaagaaaagacagacagactccaggaaggaaggtcagtctgcagctccttatagtggctaggagaaggagtctaggcagatacgactcaattagcttcatctgctgtttgtctctcaaaatctagacatgtgcactgctctggctggcccacctatcctgggcattgagttaagtgtgggggctgtgtgttgagagtccccctccattactggcaggaactccacacctcagacattgagccccaggtctgcagggagaagacgtgcttgcaaagtgagctaaaagcaaaacagcctctgacctggcaagcattcccaagtctgcacgcctgcagccagaggagagggtgatgccaggctgctgctcagatgcttttcagccatacccaggccaagacctggtgaccaggcagccagaaggagttccaggaggcacaaggcaggaagttgggggattaggaggtgtagaatggagaatgctctggggagatgggtgctttgttggtgcaactattcgtttattcctccagtgaccacgtgagcagtatggctgcacacacaggctctgcagccaagctgcctgggttcacatttggtctctgtgctttggaaaatttcataagctttctctaccagtttcccttattacccatgagattgatgtgaggattaacctagcatgtagtaaatatcctataaatattattattcaatagtgtacttctttgccaggaacaaaattcacctgttcctctttaaatgtcctccagtctgtctcctgggaaagattcttgtgagctccctggggacagggaccatattttgtttgtctcactgtatccgtagtgctttttgctaaacgaattcacttgctaaatgaatgaaccaggaacaacttaagaccttcaagaggctgccattataatgcatcttgacatctctctcctttccacatgcctttgtccgagctgtttcctaacccagtatttcactacccctcttctccatcaatatttggaatgagcaaataccgttagtgcatacctcacatggtattataattatttgctaatgcgtctgtctcctccatgactctgagctccttgagggattattccatgttgtaccccaggtgccccatgcagatgtgtattttgtgcactgttctgtgtaggctacaaaggaaaaggcctagcacctgcccttggggagctcacccacccaggatggacagaggtgtgcagacagagctgcagggtgggcacaaagggtccatctgctgaagtcctgcagatgcagccccgagcttgtccctcacgtcagcagcctggctcctggtctcagagagaactgtgtggttcccaagcattcactttaggaagaatcacttgcccctccctggctctctgcttcaaggaactgtgacaaccttgggatttgcaaactctctctttaatccttaagaggaaaatgttttggtaaaaagtcaagattagcagatacactcgggtgaaattctttccctggaaataaagaatagagccattaatatccacagtagagtgactttaaatgcccccggggggtcagcaggaaccagggccctgaggaaaggatcagcgtggggaagaggctcccacttccctgtgaggagctgcacatgcagtctcactggagctccctgctgcaatgctgttgcctgtggtggttggtgtggatgctgcctgccaagagccctgattccccaggaagagagaaaaaggcttctctcaggacggccctggtcgcatctgcctgtacaattcctggagcctttggggagctgaagtcaggggctcaagtgcccctgggtttcctggaggaggcaggtgtggtgagacagctgacagacaggagaagggatgctctgaggaagtgactgtccagccatgggaaccagatggcccctggctgtagtcctgatgctgccacttgctagctctgtgaccttgagcaggttacttcacctctctgagacagactcactgtctggacaatgagtaaaaccctacctttcctgtctcagagatttggcaatgggacccaatgacatcaattggaaaggatgctgtgggtgaaaggtaacctttcaggacagcgacaagcctgtctgggcaggatgaatgggctgtggagccctgtatatcctagctcactctttgaacctcagtttccacttcttccctttttatttattgccggggtcttaaatgagtgttgggggtatctgattctccctctgcctgtacttttggggccaagcactgagctgaaaagacaattcctcctagttctccaagcctacaacctgccccctaaccagctgtgagctgtaatacattctccagtgtcactgtgaggtttgtgccttcacccccattttatagatcaggaaacagaggctcctccaagtaaaggagcttgcctcagatttcacagccaatgagtggaaaagcctctgggattcaaatgtcagagcccatatttttcctacttctcgcacctgttatcatatgctgcctcttcctttaacctgcagttccctcccttcacctccaccgtctcaatccttcccactctttaaggttcagttcagctatgacttcttctatgaggctctactcattttctcagatttcttcctcctccaaatttcttgtaaaaattatgttttttctctgattctaaaagaatgcacattacattagaaaagatacacaagcatacagaagataaaaaccacctaatatcccatcacccagaagcttccagtttttctttatgcatttgcatatgcatttgtgtttacttttccccaaaagttctccgatactttgtcctacttttcttttgacccttataacttcctgacttcggtacctttctgatttgccctaccagagtgtgagcccctggaaggcagcctctgcaccctgattcaggttgccacacatatgccagctcctagtgggctggagggaaggacatgcggttggggaactggaagactcatgctttcagctgtgtgcttcctccctagagtgcaggcagaggaggaatcgaatcccctcagcactcttgtaaagaccacagcaatgagtgagagatggtgcctgccagacataccattctttacttttcagcttaaaacagatacaaagtttggggaggctcactggaggaggcttggggctacactggaaagagaagaacttggattcacaccccagcttcccctcttcccagctctgtcacatttgcaaactctgagtctcagtatcctcatgtgtaaaatggggatagggtttatagggttgtaaggatgagatgatgagttgtttgcaaacaacttctcacagtgcacagtgaaggtcagcaatgagagccagccccgccctttcttctttccaaatgattaatatatctgttaccagcctccattcattatatagctctgtcatgtgctaagcaccatgggggctgaaaaagatgttcttcctgccttaaaattccactggggatgaacaaattacacgggagctgatcagagaggaaggcagtccattatgagggctaattgagcagtgcagaccatgttgcaaactgagttagggcctggagagcttactgtgtgctggggtcctcaggaatgccacagatgcatcaataaccacctctgctactctggaagtagtcacatcaggaagactccagagataagcttatctgggctgtggccacagagctggaatttgtaagctttaggtttctatgtctcatgttaccagcttgtctataaattgtaaattacagccatctgatggttagggaatatgaagtttggttaagagaatgaaatgagaccacgaagattagagaacaggaaaagaggggactggggactacatacccatcagaatcttcattcagtcctgaccctcagcaggagggggatttcatcaggctcatttccatccttgatttcgtccatcctggttctcctgacaaggggcatttatcagagttatggcatgggaaatcacaggggagtaatgtaccatggcatttaagagtatgaacgttggagtcggagctattttctccgctacttactagctgtgtgactttgggcaagttacttagcctttctctgagcctcactttctttatctgtaaagtgagggcgatcagaataaacctccttcatatggttattttgagctttataaagagacaatactggctgagcacggtggctcactgccagtaatcccagcactttaggaggccaaagctggaggatcgcttgagcccaggagttggagaccagcctgggcaacatagggaatgagactcctgtctctacaaaaaatatacaaaaattagtcaggcatggtggtacgtgcctgtaatcccatctactcaggaggctaaggcaggaggatcgcttgagcccaggaggtggaggttgcagtgagccaagatcacgccattgtactccagcctgggcaacaggagtgaaaccctgtctgagagagagagagagagagaaaatactactatggtgcttataaaagttcaataaattttagctgttgttagtattattaaagtaagatctgtatgaaaataaagcagattttttcccccaaatgttcatgtcagaagtatatatttcattggcaaggggctgcttctggaaggttgagaggtatcctgggggaggggatagagcactggcaaaattggcatcacaattcaagtcacctcactcagtgttttttaagttatcaaaatccacagtatgaaaagcatttgacattacagtccactatatttatgcatttataaacaagagaaaaaatcacgaaaaatacagtaccacgtgcagtacacactgattccatctattctttttttttctttttcctcaaatgcacttgccgcctacttattccagacccaatgattgggtccctatccacagtttggaaaacactataagaaatgattgtgtcctctcactttccctctctgggatttagttttccaactataaaatgctcctgatgcccagccagcctcaccgctgctccgagtcaatgccaggaacgctgatttagcacatgctatttggagggtacccatccaggtgctgtgggagggacagagattgagaagagtgctttctgaccccacagaggccatttggaaaccctgggaatgggtgggagggttggaggtggggattgcttctcccctaagactcagcgtgatggaaaggcaatggggtgggaactaactggtgttggtctgtcccatttgtgtcccagcagccttcctgacagcgagataggagaggaccccaggtacagccttgggactgggtcagaagtgggtctcaacaaagggaaggggtagggtgggggtggaggacttgtgggtgggtaatgctgagtatggattcagggatgtgcagcctacatattttcagagacatggggctaaggcctgcattctcaatgagggcaaaatttggttcttggggacagaaaacacttagacattgcaatgctttgtggctgtccaaagtaccaaacagatgccagtatatctgtggtgctgaaatttcatggtgaatggagtcagaaaatagactagcgattgccagggtctggtgggagagagagggaagggactgccaatgtgtatgggatttgttttggggaagataaaaatgttttggaattagatagtggagatagttgcacaacctggtgaacgtacttttagtttcagaggttttctaaacctctgatttttttttaagtgacaggaaagacagaaaaaagtatatctaaaaaggctctaggggtgatcatggaaaagaaagttaagaaatatgactgtaaggaaaggagatgggtgtccctcaggccaggcagaaaattcagtcttgttgctttatgttcatgtgcaaatctaaaaaatccaagtgatatagattaatgaggctctgagtccctcaaaaccttccctccccttacctctccaaaaaacacttgagataccctagaggtggtatgaagtcaggatgggaaggttggctcagctttgcaaataagtttaagcctctggcctttgctctccaacaccaaagaggcttcactttggtatattttctctgccctttctccctccttgtccccaactgtcagtatgtgatgacaggctcagcctctgtaatggtagtgatcatatttcttgagccaaaaatcagacctcatggcatgtgacaagtttgcatatgtggatgagaacagagtggcagaatatttgacacgggagcagcttgggcagtccagggcacatggcactgcacctgacatccctggcagatcccccacattccgtggttgtcttctgatggggccatatggggctgcagatcatgcctggagccctcgcagctccagggctgcgggttcccagccccagagtgcaggtgctggtgtcagcctgcctggcctggcctggctctgtccagagcactccttgccccagctgtttgtgcagctgtatcagcctcagacctcagcctattcattccaacctgaatgcagaggctgggtctggaggagccacattgcgggcttcatactcctgatctgacaagttttccccccagagcctgcaccaatggcacctctccccattctccctcttaactgggtcctccagggccctcctcacacacccacgtggtcaggcagcagaggcttccccaagatgggcacaccccactctccacacctctctatgcagcatttgtggctacagactgggtccaggggattgtaaaggcatgctcatgttgggttggagggagctcaggatcttcctggaggatatggttcactcccatgagagctcagtatgcctttcctcccctgctgcagcccagagcgggagacagcgaccgacttggatatcaggtactgcgtcctgggaacattgccccccagggtcaactccctccagggtgctctcaggcccaagggagccacatcaccctgctgggcagcccccagaccccagccccagtgttgggggaggccagggagggcccctgtgctccaccaggtggctcgggagctgctgctgtttctgtgcatccatttactcccttcacataagatcatttttatctgggatctctttttcttttttcttcaaaaaccacatcactcaaaatgtggcttccttggctctgcttttaaaaaaaaaaaaaaaagttcttccatttggagaattacctgctgacttcaaagtccagtggcttgagggctacccaaagagggaggaagccagaagttgagtgttcccttggtttggtcacacttttgggctcctccctgactaaggaacaacagactgcagggctggggcaggctgggtgtagggcagggaggggatgaggtcctgctgccccagtcagttgagacccagacctctcaaacctgcctgggggaaggcaaggccaccagaggccacactaagcagatttctaccaactgcacctccccatccccttgcctccatctgagccatcagcttgacaactgcctctgagaacaagcccctgagaatgccttccgcaccccctactcccgccctgctttttccaggaagagaggccccgtggcctatgcttcgcagaaaccatggctgctaaatgccactgtggaggagaacatcatctttgagagtcccttcaacaaacaacggtaaaagcctgtcggagggaggcaggatgtggaggggaggaactgtctctggccagcctgccccagttccgggcccctccatcgatcacccacacccagccatctcactccccaggtgcttacctgcactccagcctctccatatggtgcacctggagaggggccaggtgtgcctgagcattggggcaatccagctcccataggggagagggcaggaatggagggaagggagagagccccgctgccttttctctagctggtgggagggctagctagctctctctgtgagtctccattcgcctggctcctgcactattttccctccaatgataatagttagggctagcatcgactgcgctcttactacataccaggcacagtgccgagctctttgtacacggaatttcctctcatgcttacaacaacctcagtaggtagatattattgttattcccactctacagatgaagaaccaagtttcagaaaggtcccaaggccacccagccagtaagtgaccaagatgggtctcaaatccaaagctgcctaacacctaagtacatgtttgtcaccaacatactctgatgcctccatgaactctggctggcacctgcccaggctaagggctggctggggaagtatgagaggaacaggctgggcaaatatttgaccagccatcatcattactgcctaaaccaaccagcagtggttttccctgcagtgccccaagcacgggttccggctgcagcttttcccactgcacagagatcatgagcgccctttcatcacttactctgcatatttgttcccaaccaattccatccttctagtatttaacctgcccaaacgctgtgtgaagtgctgacctcagctcttttcaagctcacacggtgtttgcttgcacccaagcgggaggcctattaaagccattgctcaccctgggcatagctacccagagactaatgaccctctgcaagtgctcgggccaactctgaccaggctgaccagctgcatcccctgcctctacccacgccaggtacaagatggtcattgaagcctgctctctgcagccagacatcgacatcctgccccatggagaccagacccagattggggaacgggttagtagcagcctctgaggggttttttcaaagccaggacccccaacctaccatgccctgagacactactcaggacaatgggtaactaggaaataggagacattgaaggctgaagagttgcctgcagtaaggtcaaacatgttgttcttgatgatgtcctttgacaggttttcagtcctgcttggagggcaaggtcagcttagtgccctcccaggctggggatcttcttcatttgcaccccaggtatacactgagagcccacacagcactgtgctcagcctggggttgtattgttcctgttcatcctccagatggggtcccctccacaagcttagacgaacaggattctcctgtgactgtcctccttttgtgtgattttaatccctgctgcctctgtctttgtttgtactggtcagatggtccctagcgcctacacaatgaatctttaaagacttggggctcatgctgccctcttctgaatgaattcagtaaacacgtgcaagttccttctctatgcaaggtgagaagcaggcaaagaagtggatagagccaggcctccatcccaaagagctcatagtccagtagggtacaggacagtgtctcctgaatggctgagggcatgatgtgttcctcctctttggtgacagggcatcaacctgtctggtggtcaacgccagcgaatcagtgtggcccgagccctctaccagcacgccaacgttgtcttcttggtgagtgcaagttcccttggggtcctggtctctggctgcctcccaggcctaactgcccacctccacctccccgcaaccccaccatcatccaacaatctccctctccaggagtaaatccctcctgccagagatattgccttatcatcctagtgatagggaaactgaggcaggcaaggatagcacaaatgacccattgcagacttcagatggagctctgcagtagccaatgaggagaggcaagctgtagttataggctgcctgtctgtgggacagcccaacccctcaacacttatgcagcccgactataagaatggctgataacagaatgtgtgctgccacttcccatcttatgcccagtgcagacattgctaattgttcacagcattatttcccatggaacttaactcatcctcagaatccttctcaacacagcactccaggtaaccactagccatcaaacatgagataaaactaggccaggcgcggtggctcacgcctgttattccagcactttgggaggccgaggcaggcggatcacgaggtcgggagatcgagaccatcctggccaacacggtgaaaccccgtctctactaaaaatacaaaaaattagctgggtgcggtggcgggcgcctgtagtcccagctactccggaggctgaggcaggagaatggcgtgaacccgggaggcggagcttgcagcgagccgagatcgcaccactgcactccagcctggggacaaaccgagactttgtctcaaaaaaaaaaaaaaaaaaaagaacgtattcgcaatccttacactacttcatgtcaagttctgttgtgtcaggtgccttgactgacactgaagaattctaagaaccagtccttggcctcaaagatttagaatctgattagggagacagagctcacccagttcaagaggcccagcccggttcaaatccaaactgtgcggcataaactatgagggggccttgtccagggagacaactgtgagggctggagtaatcagggagggcttcctggaggagagcctcaaagggagagtcaattaaacagaaggaaagagggaggccatttgcacagtgagttggaagaaggaagctcaagtctctgattccagctttattccctcccctctccctacaccacacgcacaagcactcctttactaaagacacttcacagtgggaagattcagtctccgttaccgtctgacacacacacagcgttttacaaagcatgggtgcattcgcgatctctcatgagatttaaacaaccctgctagagaaaagtgaagtggacattttatttcagtaaacgtttatgaagcgtctactctgtgccaggcactaaacgtttatgaagcgtctactctgtgccaggcacaggcacaagaagtctcagttcttgggagtgccataatcaggaatggacaaacaatgatcagatctggctttgcgccagtgtcacgggaatagggaggaaggaagggtaggcgtgggggtcaggacaggatgcaggaggaactggtgcttaggtgagcgaaggatgggtgggagttcacaaggcagacaaaaggcagagcagcactccaggcagaggaacagctcaggagaaggcccagacggcaggcttcctgggaacctggaatgcagagtgctgggaaagcacagatgaagcatgagtctagaagggaaagcgagaggttataaagcacctggaacaccagcccacagggtttgactttagagatgatggggagccgttgaaggtccaggagtcaggcagtgaagtgattagatctgtttgagagtgatatctgacaactgccccattttaaatgaggtaaccaaggcccagagaggttgggtgagttgtccaaagccacacagctaactagcttcagtccctagagcagagttgatagaactctaatgggttttatactcattgtcacccctccccaccatgcctttccctaccctctactctcttcctctcccttctgcccaggatgaccccttctcagctctggatatccatctgagtgaccacttaatgcaggccggcatccttgagctgctccgggacgacaagaggacagtggtcttagtgacccacaagctacagtacctgccccatgcagactgggtgagggggaacaagggggtcaggctatagggggcagggctggggaggctgtcaggcatcttggcaggaaccaatccgttgtcttggtagcaactgctgagggccacaaagcataagagaccagcactggatggctttatgcatgctgggcatttcagggagaccctgtacaggccaggggtttggtatcacctagacccacagacactccccatcctggcccgggccccccatggtacactcaaggctggcaccaagaagtctcaggaataatcaagtgctcacttctcaccttctgattcctgcccttttgatgacccatccccgcagtcatggggagtgcccatttggatggaaaagccctcttcccaccctatgaccttcccggggtggatggatgcaccaccccgggaatcatatgggaaatatggaaccaaacaatagcagtagtaatagaaacttcaggctgggcgcaggggctcacacctgtaatcccagcactttgggaggccaggacaagaggatcacttgagcccagaagtttaaggctgctgtgaaccatgatcatgccactgcactccactacagcctgggcgacagagccttgtctctgaaaatttgaaaaaggaaagaaagaaagaaagaaacttcaatattatcagtagagtccaatgttgtgaaacccctcattaactaaatttccatactcttcagtaggtagaaaataattactttttgattcattagaaagcacttaatttttaagatggagatcatgtaattttgaactctaggtcttgcctactcctatataaattctcctctaaacaacagccaaaattgaggccctctttgagcttcaggctggtgccaaatggctctgcttattttccccaaaataaatcttccttccatgtatgatgagaccccctccagtataaagaagacccaaagaaaatcacccaaagaaaaaaggcccaaagataagacccaaagacctaaagatttaaatatatatacagatacagaaggtttgtttctgagtttctgtagtgaccttggcaataccttgtagttcaggacaatcctgaggaacacagaagtgctggcttccttgaggaatcagtgatcaggactctcgagccccttgaaccccagcatagggcgggagggggtgagggcagcaggggtgggtgtctgaattaatgtcaggtctacgtgatggtgtcatcaagtgttccagataaaaagttttattgagccgggcgcggtggctaatgcctgtaatcccagcaccttgggaggccaaggcgggtggattgcttgagcccaggagttcgagaccagcttggggcaacatggtgaaaccctatctctataaaaaaaaaaaaaaaaattagccaggtatggtggcgtgcacctgtggtcccagctactcaggaggctgaggcaggaggatggcttgagccaggaagcagagattgcagtgagctgagatggtgccattgcaccccagcctaggcaacagagtgagaccctgtctcaaaaaaaaaaaaaaaaaaagatttattgattccaaagaggcatggccacacacacttagaccagcaggtgctttgctaagccctgatggaggctgccagacccgccgtcaagaggagctaagggtagtgtacaatgagcccacttagtgtatgacggccgctgccgtgggtggagtccttgtgagtaaccagccagcttgagcaggatgcactaatttgctctgcaaacccagccattgagaaatacgcctcagatgtaccgaactctaggtcctaggagtatgttggttggggtaggttatcaataccagcccacttgcagtggatgagctggtggccatttgtagtgaggaaagggatgtgtcaacctccatcttagactccacaattgagggatgtgaccaccattcctccccagccagcccccaaaccacgtttgttgctgcctttccagatcattgccatgaaggatggcaccatccagagggagggtaccctcaaggacttccagaggtctgaatgccagctctttgagcactggaagaccctcatgaaccgacaggaccaagagctggagaaggtgggtatatccagggatggccaagcagccacccctggatgcaaaggttctgctagaacctgaactcataaaggtcttcctgtccttagtgccccaggaagccccctaaagggcagatgtgggagctgggcatgaactggctcctaccagaggagagacagtacctgtgccaggtgcccagggcagaatcaggtgggcaccttcgccttatcctgaggtagtcagatactatttagttgcaaagtttcagaaaatcaactcaaactggcaaagaaaactaagcaaagaaaacaagagggaattaaggatttattgacccatgaaaccaaaaagtccaggtgtgtcatagctttaagtgtgctggatccaggtagtcagtgtaatcagaaatctgtttctcccatctcttgactctgctcccctcaaattggctcagctcccctcaaattggctccattctcatggtatcagtgagggccaccagcagtcttaggtttacattctcccagctcaacaactctgccagaaaaaaagtgcctctttccccatagttcagcaaaagtcccagggctgagtctcactggtccagtttggtcatgtgcccacccctgaacaaatcactgtggccagcggtgtggaatgtgaggattggcctgtcctgggtcacgtgccactttgggagccagatccacctgaatcacagagactaaaaacaggggaagagtggttccccacagggatatgggggtgctattatctgatgaaggggaaggactaaatcctggcaagatgaatgtgtgtctgtctgcccctccctcaggcagggacaaagtagaaatctgacattggtcatcaccagagtagttaccccttaacttccccttcccccaccaaccatatatcctgaagacattgcccaggccacatctgtcttttaggagactgtcacagagagaaaagccacagagccaccccagggcctatctcgtgccatgtcctcgagggatggccttctgcaggatgaggaagaggaggaaggtacaggcaatgggactgggagtgaaattatggcctgaggtctgatcagccacagagaggctaaggtttggggttctgggtgtggtgcagtagtgtgcctttgattaaatggcttccctctgtgtgcccccgttgtcccctcagtaagtggggataaaatgccctgattcaccctcagagggatggaaatgtgtagccacagagtgggttcttgcggcctgcagaggaggcagctgagagcgaggaggatgacaacctgtcgtccatgctgcaccagcgtgctgagatcccatggcgagcctgcgccaagtacctgtcctccgccggcatcctgctcctgtcgttgctggtcttctcacagctgctcaagcacatggtcctggtggccatcgactactggctggccaagtggaccgacagcgccctgaccctgacccctgcagccaggaactgctccctcagccaggtgtgactggcggcccatggcagaggttgggagtggggatgggggaagggctgagcccatgggcaccctggaactccaaatcactctctgcctgtgaaggagtgcaccctcgaccagactgtctatgccatggtgttcacggtgctctgcagcctgggcattgtgctgtgcctcgtcacgtctgtcactgtggagtggacagggctgaaggtggccaagagactgcaccgcagcctgctaaaccggatcatcctagcccccatgaggtacccgtctcccctggccaggctgggactgtgagcaagtcactgttctctgagccttagtcttcccatctataaaatggggatatacaacctgtcacaagcttgtgggggtgactcaaggagacagtgtgtgtaaaagtgccctccttgtgcaagaagcagggagaaactggcatttactcagccagatactgtgataggcattgtgtgtggttagctcatttaattgttaccatggccctttaaagtgagcgtctgcacatccaagtaaagattgttttctcctccctaagtgggtgtaatttgcccatccccacccatgagttcagctccctgccctcccctcactctctctccctcagccagcctcaggttttgacactgggggaacaggtagctgttctattaataatttcctgtaatgggatggataaaaatctcaaaggccacttgatgtcaaagaggtttaaagttgtccctgcccaattggttggccaacttggcttaaaaacacaacaggcaaacagattttctggccccttgtcgaggctagacctcacaatctaactgcactttttactttccagcctcatgagttttctgtggcccacagatatggcctccaagtttatttacttttactctctatttgccccagctctgtagttctgaaactccctggttggggttgggctgactctgggtcagccagccggcaggctgtccccagggccctgttcctcttggcaggttgtccctctggagaggactctgtgtcccaggaggacagctgctgagtcaggccgagccggcagctgagaaaggcggcagtcgtcagatgggcttgagaaactgaaaggctaacgaaaggccagcgcccctttgggcagctgcaggaattcacggggatacaggccagatgtctacaaattggcagaggatgccagacccatgaatgactccagagacacttacatgaaataattaactatctcattcagtaaacaggaagtaaatcaatggacaaatgagtaactcttcctctggctgcctcttaggttttttgagaccacgccccttgggagcatcctgaacagattttcatctgactgtaacaccatcgaccaggtacagaggaccgtgccacactatccccccttccagagacacctcggacccctgggggcttctcctgtctgaggctgggttccccagatcaggtgatcacagccctctgggaagaagccagtgtccccgatccgattataatgctgcttcagggctggggcctccctcgtgggagcctcacagtaaggctgagggaaaccagatccctttagcttccacctgagatcccactggctttctctagtaaagttccagcatattctgaaccaaggtggctgattgtatggagaatattcattttgattcagcctgtgttctttatttaccattgtaccagatggtgtgaaaacaaaatcttgattcctacctcagggagtttaccttgtagctggagagatgagatacgtgcctataataaagggagagcaaggccgggctcagtggctcactcctgtaaccccagcactttgggaggcggaggcaggcggatcacttgaggccaggtgttcaagaccagcctgatggccaacatgatgaaaccccttctctattaaaaatacaaaaattagccaggtgtggtggcaggtgcctgtaatcccaactacttgggaagctgaggcaggagaatcatttgaacccaaggggcagaggctgccgtgaaccgagattacgctgctgcactcaagtctgggcaacagtgagactcagtctcaaaaaaataaaggatcaaaaaataaagtgagagcaaaacatggcggccagtagcactctaaacacagtcaataccaaaattcacctcactctctccccctcgtctccctcagcacatcccatccacgctggagtgcctgagccgctccaccctgctctgtgtctcagccctggccgtcatctcctatgtcacacctgtgttcctcgtggccctcttgcccctggccatcgtgtgctacttcatccagaagtacttccgggtggcgtccaggtgatggcctcaggggtgaggggtgggaggtgctttgcaatgtgcagtttggtgtacttgctagactcatcgttatgagagtaatagggtcgtgttccctccaaaaaataaaaacaaaaaacagaaatgaaggaaatagaaatatccacatcttattccaccgccctaatataatagtctgccaacacacgcacacactgaggttgacatctgaattatttccttgggcgatatggtcaggactggaattgctaggtcatgataaatgcacattttatgcccttcattcattttgccaacatgcttcccaggagggttgcatcattctagtggtcaggctgattgctgatgcatgaaatcggcgggcacctgattcaagcagtgttatgataacacctcccagcccacgtgagtccagagtgtagctgtaagccttgacttgagggagcctctcacagccattctcatggatcacatttgccctcatgagctttggatccatgcacgcctctttcctcctcaaaattttctaagaatgttctctagggagttctttctgggagtgattctcccagattcatagaaactcatagattcaaaaaattgtaggaaaaaatttaaagaacgtctaggccagtgtttctcaaactgccaattacagcccatcagtgggtcatgaaatcaatatcatggatcacaaccagcatttttttaaaaatgaaaaaaacatcagactgtattcatagagtaaagcaagctttgcttcatgaaacctttgtgttggtcatggaggtgtgtgagtactgatttgtgagataaaatatatttctgactgcaggttgtggtcagaaaggttaagtacctttcccaagtgcacatagttggctagaaactagagttgagatacttattagcaataataaaatttagatgcattttggacacaattacctgccccaaaggatcaacatttgtataaatggctttttgcttggatgatccagaatggcccgacacccacacgaacaacatagctttttgacactcaaaaaattcaaagtgctgcacaagctgttctacaaagttcatttcttctgccagagaaacagcccagtctctgtggcacccagtctgaccctggagatggtttatcagggaaatcaacttcctgcatcccaaactggcctccctggcactgatgtgcttgtcgaggtgcagctttggggagcaggaggcaattctgttgccatggaaacctctggccttaccccgagacgaaacctatcatttcagcacatcactggccagggtctaaagagctccttgatggggtaagcggaagacggggttgaacgctttgagtttggtcttctgttcctttggccagctgtctcaaggttcagattgttcacctgtaaaatggaactagcactgcctgcccagccttagctcagctccaggctgtgcagcagaagtacagggacagatggcgacctggggttgacaatgcccaggacagcagtaattgtgccccacatcaggctgtgtctaagcattgtacataaacgatctcattcagtgctcacaaaagctcaatgggctggtggcattgtcttcccccttcacggggtaagaagctgaggcctagagaggtaaggccattcacccacacagcggtagcaggtggagctaggcttcaggcccaggccgagccctgagcctgccctcttaactgttccactctgttccccgccacagggacctgcagcagctggatgacaccacccagcttccacttctctcacactttgccgaaaccgtagaaggactcaccaccatccgggccttcaggtacgagtccacattcccccaaggtaggagtggaacaggggtggggccagggggcacaggccatgagatttgattctcaggactccacttgggaaggccaaggacacgttctctctcaagctgcctcaggtcccaaggcccaagggatatccaccagcagggacaggccaggtgggctcccactgaatgttctagagaggaaaattccagctctgtagacaagcccaggacctctgtgaggcagagcatgaaaagagacaaagctgggacaagtcttcatgtatcaacgctagaaagggccttaggtgcgggccaccctaagcccttcttttattaaggagcccctgtgtgccaaacactatgctgagtactgtacaggccaatcccactcattctgcactgcaaccctcggtgctgagaatggtcatttccattgcacagacaaggaaactgaggcacagagacgttctataacctctctgtgtaaggtgccacaaagcccagacttgaacctatttgttcatgcaacaaacatttactaagccccgactatgtgctaagccccatgccaggcactaaaaagatgagtcaaataagccgctgccctgcaggcgtttacagcccagactttgagcaggccaggataaatccacgtgacaagtattctgaaaaaagcggattcaagggctgtgggagcatagaagagagacagtccgggaaggtttttgtaccagaggtgtcatcagaactaggactcaaaggaggggcaggagttcaccaggctgaggaattcctgaaaacttcagtgcccctgccatcgtctcactaccctgagtggtgatgttggggtggacaggagcatctgaggttgcctggggaatgagggaagctgttgtttcccactccccaagagtctgtctgatctccagaggcatctctcttccagtcaggcaggccagagacccctgacacacaaagttgggctcttttctcatcttcatccagagagtgataataggttatttttagggtggcacagctgcacgaagtatgacagtaaccatgagacaccaagcactgtgtccaggagtaaccatagggcacaaggaccagccaagggccagagaggcttacatctcctccccccaacccctgaagtccagcttcagccctggagaggtatccaggcccctctgcccaccctggagcacctagggccagtggaaatccacctcttagggatcttgtctaagtaaagaagagcagagcaaagctctgccctggccttggcgctgctccctggacatcccttgcccctggacaagcctatgctgtgtcttccacaaagaagcttgctggggactggattatgactctagagtctcctcccagcctcctcttctcaagcctgaacttctcccgttccttcaacttccaggtccctcgacattactgagcctagcctttgctctaagttttggtgatttccctctctcaattggtgtctcagagggccctggggtagagagatggtgactcttctagagtgggccacagccccttgtgtgcagatcccagcttcctgtaaacagcctcagatcaggccaaacctgtggtcagccagagccactgctacccagtgaggtcttccacaccctactgacacggtgaatgatttttaaatttgaatgaaaggctttttaatcaaccccatacacatttaatgcattggctttaatccagcagcctgttgagagctattagcacttattgattgcccacttactgtatgccaggcaccgtgctaagtgttgtatgtgcattattacatttaatcctcacaaggaccacataacataggtacgaatcgccacattctccagatgcagaagcgagacccagagaggctgggtaatcaatccaaggtcacacagactgcgggggctggcgctgagcttggaacccaggtttgcctgaccttctgggctttcctaagagatcttattttttcccaaaagagtttcaagagtgcccagcactgggctcagtggcgggctcggaggttgttttcgttcatgtaggaactatcacttccccatttttttcataagaaaactgagtctcagtcctgatacacagccaggaagttgtgatgttcaggctccaacctgggtttacatggctccgaggctggggctcttttctagtcctcagacacactgtcgcacgcctgtggcagaagctcccatctcacacttgccgaccctcaactcacacagtcctgagacccacatacgctgagcgcctcacactcctataacacgcacatgccctgatgcacacacattttcaacacgcacttactctacccttcaggcatggtttcacactcactgcagacacgtcaccctcccacacgtctccaccctgggggtgtgcagtagcatgctctctcccacctcagaacctcccttcagtcccctcagacacatgccctctctccacgcagagacaatcaaagctgaactaacaccttccagggtgaaaagcaaatgcccagtaaggtacgtcttgggtgcctccgtgtcccctgagtttggtcctatcaaaccagcgatgatgaggcagcttttctttcgttccttcctccatcatcaaacaagtgctcctgcatctcctctgggccgggcctacgtcagcaaggtctgagggaagcggccaaggagagtgatgacggcagcccaggttgatcagagaaaggaggcaggtccatgcgcagtaactcagggaaaacatgatgaggacctaaggatgagaaagaagcctccagagttccctgtgcagagagattccatcaatttcagagggtcaggggagtgccatgcattcatccaacaaatatttattgatagtgccaggtgctggggtatattggtgaataaaacatcttcatggaatttgcagtctattgagggagatgattataaatagctagagaaatgcatgtacagcagatactgtggagcaaacaggttgcagacaataataggggaaacctactttatagtaaggtagtagccaggaagagcctctctgaggaggcagcatttaaggcaagccctgaaggttgagttgagccagccttatgaagagcaagggcaaaagccttccaggaaaagggaatagtgtgtgcaaaggccctggggtagggaagactttagtattgtcacagagcttttaaaaagctgagtggctgcagcatagtgtgtggggtgtttgtggcaggaattaggttggcaggagggggttcttcatcctataagcagtggaaggtcattaatattcttttttatttgtttttttttttttttttttttttttttttgaggcagagtctcactttgtcacccaggctggagtgcagtgaggtgatcttggctcactgcaacctccacctcccgggttcaagcaattatcctggcttcctcagcctcccaagtagctgggattacaggtgtgcaccaccatgcccagctactaatttttgtattattagtagagacagaattccaccatgttggccaggctggtcttgaactcttgacctcaggtgatccgcccgcctcagcctcccaaagtgctgggattacaggggtgagtcaccgcatccggccggagatcattaatattctaaacagtgggggagaggacacagtttgcgatttagatagattaagccagccactgtgtggagcatggactgtagggagacagcaggtagacgtattcaggaagctgatgcagtagtccaggtgagagtttgtggtgggcaggaagcaggatagagggggagggaggcaaggactcttttagagagagacataagaggacttgccaaggggctgaatgtgaatccaggtgattcctgggtgagaaactgggtaaagggaggtgccccttattataatgggaaagacctagagaaaatggatcttggggtgaaaacaagagtttggaggaggtggggattctggacaggtttgaataagcagaaaggagtggggtggacattccagagagggatagcttacatgaagtggccacggtggcatgtctggggactggaggggccctggagcctccctctgcaggtagggagactcctaggagctatgtggaccaacactgttcccttaggagcttctcatcctccctccaggtatgaggcccggttccagcagaagcttctcgaatacacagactccaacaacattgcttccctcttcctcacagctgccaacagatggctggaagtccgaatggcaagtgctattcccctctaccctggcctctgataggagggtggggccagagcaagagcacacaggtacctggggatgaaagagaggataggataccagatcgtgtggacaccaagccttcctgcttcccccagccctggtggtcctcctagtgtctagcctgtgctccttttccccatatcactgcctggaggcttgtgtatctgaggtgtgtgccagtggcaagaacagttgtggtgaatgtgtatctgcagtgggtcatatgacacccacattgtgtgtgtttgtgggccagctgaggcgtgcatgttaaagggtgtgcaggggctagggggtaggggagcatgagcttgtgggacatgttggctcctggggctccagccttcgcagcccttgtgtgtgtctggtgacgtgtgcatgagttgcagggctggagtggaggcctggctgagctgctctctgccccgaaaaggagtgaggtagaacaggggcctgtggctctaacccctgagcgcccaggtcagctcctctccctccccaggagtacatcggtgcatgtgtggtgctcatcgcagcggtgacctccatctccaactccctgcacagggagctctctgctggcctggtgggcctgggccttacctacgccctaatggtgagcggcagtgggctagggcagaggaggggtcagacaccagcactcccggagcaccttcgtcactggagacatgagacactcccaggccttaccccaatttcatttgcatctgatgccagagggacagtgcgggcaggaaggctgaccagcaggccccagggcccaggccccagacaggtggaggttggggagccacatgactgaccctccctgtgcctccagggagggctgctctgagcaggcagtggatggcagcaaaaggaatctggggccctggcccctctccagccttaagaagagccattctggtggctgaggacagaactaagcgaccatggagtgtgcgccactggcttgctccccacaggtctccaactacctcaactggatggtgaggaacctggcagacatggagctccagctgggggctgtgaagcgcatccatgggctcctgaaaaccgaggcagagagctacgaggggctcctgggtgagaggctcagggagaggggtggggaagagtccaaggaggagtgtgtctgggttgggggccacaagggagcctggggatggggtggcactttcggatactagctgtggcccatgcctggtggctgagcccagcccggcccccagcaccatcgctgatcccaaagaactggccagaccaagggaagatccagatccagaacctgagcgtgcgctacgacagctccctgaagccggtgctgaagcacgtcaatgccctcatcgcccctggacagaaggtcagagcacgggcccaacccaatgctgcaggacaggcgtgagcaggggatggggcatgcacggagctggatggcttcgcagtcacctcgtggccctccagggccgaggcctctcactattcagacatcgcagtctcctgccctgggcctgtgggggcccatctttcctctccttctattgccttcccccagtgctgccctcaggccttgtcttctcactcatccaccaaggagaccgacactctggactcccccagctcacacgggctttgtcagggcctccctctctgcgaatggtcaggggctttccctagggcactgccccgagcttcagggcagggacctgggggcagacagcgaggccacccttgtattgagggtgagcccctgcctatggccctggcccagctctcctctcgtttcccactctgtctctttgtctctgtctcactttgctgtggctgtccatgtcattctctgaccttgggatgtacctctgtccctgcctctctcatccttctatgtcactatctgtctccgtattgtaatttctgttggtacccaagtgccaggaagcaacgggatcagaggtggctccattgtagggcggggcacacagacacatccatgcataccactctcagctgcccctgtgtcctcctgccacacccatgcccatagagacacaccactgccccccagctctccttcagccaagtacccggcacacccagacccacaccaaggcccaggcaaatggacatccatgcctgcacttgcgtgccggtccctgtgtaagccctctctggacccactgcaggaaacaagcccaaacctgtggtgtccaaagagaaactagtcagaaaaccaggccaaaaagataccctgtgacctcccacacctgcacacacacccagagctagcatagaggctattcccagcagccccagagtcccagtggcggtgcctgcttctctctttccagatcgggatctgcggccgcaccggcagtgggaagtcctccttctctcttgccttcttccgcatggtggacacgttcgaaggtgagttgtaaggcgggcaccccacgtgtacccacagccaccagatgaggcctcagccctggcacgtggtcagacatgacaggaggcccagcagtcaccgccttcccctgcaccctcactgggacccatgcagggcacatcatcattgatggcattgacatcgccaaactgccgctgcacaccctgcgctcacgcctctccatcatcctgcaggaccccgtcctcttcagcggcaccatccggtgagccccaccacccctcaggcccacccagccccaggccggctcagttccatcagatctggagcacaaagaggagggggttgggggagaccaggatcccagaggtgtttcctgctcatgcccttctccatcccatcaggcccaggcagcctctggaaggggatcccccacccatgggtctaagatgctgtcccccacccactgccaccacctcggtgcttctcccagccagacctccaactcagtctgctctcgctcactgccctctttgccgcctggggatgcaggcaggaccctgctccctccctactggggctttctgtgccacttccagatttaacctggaccctgagaggaagtgctcagatagcacactgtgggaggccctggaaatcgcccagctgaagctggtggtgaaggcactgccaggaggcctcggtaactactcctggctatgcagctgggttggttgggcactcaaggaccctgtaaggatggcagacagaagcccgtgtctcaggtttgccccaagtttggagtctgaagcctggcaggaccatttagtcctacttctcactatacgggggcccagagaggtcaggtgtcttgccccaggtcacacaactggtcagttcagggtctggctcctcctgcagggtacagcgggtacagtcagggatccttgtgagacagagattgcgagtcccccatgccaagggggcatcttcagccctgccctgccccatccacctgcatgcccagttctgccttaggggaggagaagatggactgggcaatcatagacacgggtcactcatcaaggccaccggtgattggcaaagccttggtatatttgctgcagctcctggagcattgggggtggccaagccttggtttcaatgaatcaccctaccaaggccctacatacacactcagtgcacccctcagtgcacacgccccctcccagaactgcccagggccacagcagcacacacctccaggggtgcccttctcgttgcagtccttgcagacggcctccacattgttgtgtcaggtgcaccagccctgcacacgcctgtgctcttggacacacacccacctatttgcccccatgcacacattttccaacagccccccaagccatcccatctgctccactcacagcacaagattaactcagtcctacttcatctccccgggctgttttcagatgccatcatcacagaaggcggggagaatttcagccagggacagaggcagctgttctgcctggcccgggccttcgtgaggaagaccagcatcttcatcatggacgaggccacggcttccattgacatggccacggttggtcctgggcccctccatgggaccatggtcttggaaagggtttagtgggatgctagggagaaatttgcacgaagtagtcctgaggctcaagttgcctctaacatcaaatgctatgtgttgcagaaaatgaaaagagctggggggaccctgactctgtctagtcttagggaatgttacacacacacacgcacacacaaaaacactatgcaaacacacacataagctgcacacacagacccacacagacttcacactgtcacctatcacaacagcacacacacagccacaaccacaacctacatacacacacagagctgagctcccaacaggctgagtccagtccctgagtgccgggaacctgttcagtcctgtggggtgggggtgggactaggatcggggtcagatgggagctgagccacagacctgggctccacatcccccaagccaggccagaccccatccactgggcaggtgagccaacagctgttgcccccacttggcaggaaaacatcctccaaaaggtggtgatgacagccttcgcagaccgcactgtggtcaccatcgcggtaaggggcccattgatggggtgcagagggacacccagggacaggactggcctgttgtggccgtcatcagtgcacagcccctgggcttgcctggtcccagtaatcaagaaagaaccctgaagcaggcagttcagggcaaggggcctggagggcatgcagggagcctgggttgcaggatttggggtggggggttttgcccctgtgcttccctcagacctcccctctccttctccaggttccaaggcctgcccctgtcccaaggccttatatgttaggctggcgttacttctccataggaagtgggggaggggttgtggagggtctctgagccttgaagcctggaggtggggtagagttgggacttggagaggagagaagggtggtattagcagatggagagcttgtagtcacatccaccccaggaaagtgcagtccccacagtgacaggacattctggccacatgcctcatcctcctcctccaagccgcaggagggccaccctcagctgtggcccccaccgcgggtggtattcccaccatcctgacccgccccctcctgccctgcccagcatcgagtgcacaccatcctgagtgcagacctggtgatcgtcctgaagcggggtgccatccttgagttcgataagccagagaagctgctcagccggaaggacagcgtcttcgcctccttcgtccgtgcagacaagtgacctgccagagcccaagtgccatcccacattcggaccctgcccatacccctgcctgggttttctaactgtaaatcacttgtaaataaat

SEQ ID NO: 15338 - DNA, 83801 bp, Homo sapiens
gggccgggcggcggagctgcaagggacagaggcgcggcaggcgcgcggagccagcggagccagctgagcccgagcccagcccgcgcccgcgccgccatgcccctggccttctgcggcagcgagaaccactcggccgcctaccgggtggaccagggggtcctcaacaacggctgctttgtggacgcgctcaacgtggtgccgcacgtcttcctactcttcatcaccttccccatcctcttcattggtgagtgcgcgcagcgagccgcggaggaggggacgggagagcagggagggaggaggaggcgctgcgcgccgcaccgctcggcgtccccttccggcccgcgaccgccgtccgcctcgttcccggggtcccctgccctgtgtcctgcccgccggtccccgcactcgcacaccagctcatcccttcactcccccggtgcccccgatcccgcgccaaacacagcggacgtttgtgacccatgggatcaccaagttttgcttctgcagggccaagagctgggatggggaaaagggaaagaggaggtctcagcacgcagtgggaaactggagaggggtcgggcctcaccctccgtggcgcagcttagggagccgggtcacccctcccgcaaggcagcctccctgtcagccgcagctgggcctagggaagagggaagcctgtgctttggagtctgggatggaggcccagctaacccctatgctttcaccgggctgagccgcgcagtggtccgtgatctctgacagtcccaggcccgcgccctgggcgaggagaggcgagagctagggacttggattcccttcccccgccaccccacccgggcatgtgtctccagagcgcaacttctcaggctctgcgcaaagtagctccgactcgccgacgcagcgaccccggcgcccttgcttgcaaagttgggcgccacggccgggacaatcgtgcgtgcctctccactgaggtcccccccatctctctccaagaccttgactcttccagaccagtcaagtctatcaactcatagggtgtcccctgcatccccaaaacgtgttcattcactttaagaaaacaagcaaatcttaaaattcatatacagctttggggaagaaaggaaagattgtcacaaaattagatttacaagaggttgctgcagaagcagagttgctagttattaacaaagacagttagatagaaatagaaataaaacatacaaaatatgtgctcatatgtgcatcaaaaatcaaaaaagaacagcatttacacttctgttctcagccaaacggtttattaacctgatgacttgtcacacaagaagttagtatgtataatggggtaccttggcagggcacagtggcttacatctgtaatctcagcattttggtgggctgtgacaggaagactgcttgagtccaggagttcgagaccagcctgggcaacatagtgagaccccccccgccctttctacaaaaaattaaaaattagctgagcatggtgatgtgcgcctgtagtcccagctactcaggaggctgaggcgggaggatcacttgagcctaggagatcaaggctgtagtgagccgtgatcgtggcactgcactccagcagaggcaacagagcaagaccctgtctcagtaaaaaggtgtggtgggggaggtaccagcataggaccaggctgaatgagttggacgtttagtttgtgtgtaccagccttggggatcctcatgtgtaggtgtcaccctcaccatggacccaatgcccaagcacctttctggggttcatgcaccctcttcctcctccaagtgggcaggcatcctgcctctgactgtctctccctgcaggatggggaagtcagagctccaaggtgcacatccaccacagcacatggcttcatttccctgggcacaacctgcggtggatcctgaccttcatgctgctcttcgtcctggtgtgtgagattgcagagggcatcctgtctgatgggtgagtgactgtctgaggactcaggaaagtgaatctgctccagggtacttcctgaaaggcccaaggagatcctagctcacctatattccacaagcccatgtcttttgttactacatccagcagctcagtgtcttctatgtgccaacctctctgagctgggcactggacgcaagtgagtcccaggccctgccatcagtccaggagagcagagggaacacggacctgcatgccaagtcccagtgaaataatgctagagcctattagaatgccacaactccagtgaaaaatgtctggcctcttctacaacctgccggagttaccttcttggaaaaaaaaaaaaatctaaccatgccacccactcttgcataagacctttccttggttctcagctgttttgaagatgtggtctcagatcctcagcccaccattcaaggtcttcacagtcagccccacctatctctggcctcattccccatgcccaccttccgtttgggcctcacagcacactcctcacacctctgctacagcacagatcacactgtatgttaaagtttatgtctatttgcaaaactgtcttcagagtcagaaaggcctaagagttagaatctgagtcttgttcatctttgtgttcacagtgcaaggcatgtgataaacataaacattattcagtccataaacatttattgggtccttaggagaatgaatgaaaccatgttacaaataagtactctgggaggtgagaggaaggcagaattgggcaagctccatggttgagagggctttggagcggagtctggaagggtgactaggcttcagacacacagaggaggaaggagagagagaactggtggtgcctgagggaagggaaaaggcaccaaagagaaaagcaggtagggctagggagcagcgcaggggctggagcattaaacacaggctggggagcgatggaggctgaggctgggaacccaggttggggcatctcaggaggactgtgaatcccagcctgcatgtttgggtcggatttggtcagcagtttggaacagaagagagatgtcatcagcataacacttttaggtgggaacctgaggtgttcagcgcaggctggaggcagggagaatctagaggtataatagaagcaggacttagcattgactgcagtagtctaggtgagcaataactgcagacagaaatggtgtgtcagcagtcagggacagaagaggagcgggagcagccatctcactaaggaagaatccagtaaccagcaaggatgagagactgccaggagagggagtggtggaggagagggatatttggcttgagtatctgaggtccagcgccccctgagctggaatcagattatacccagactgcactcctgcagtgctgcctggctcctgtagttggatggcaggggataggctccctcatcctccctcccgttccccaccttcccttccccaatgtccctgcatcctggcttcagcagtgatctctaaaatacctgcttgacttggaggcagcagctctgcctgcttattaaagtccctagaccagcaagaagaccagaaggcatactgctacacaagcacgtgacaagtccgcctccacccccacccctacaccccttccaaagtagcacaaatgccacagtgagccctcagatgggaaatactcaccagatggtgacagagaaagacacctccgcccttggagaaggaagacctgggtcttcagtgagcactgctgctgtgtaccagctatgggactttgcacaagtcattcaggctttctgggcctcataagcatttataaacatacgataaaacattttagttgccaacttaaaaatgtgtgagaaagtataaggtgtttcaaaattatttcaaggagtaaagaggcaagagttttgaagatccctgggcagggtgttggctgttcccagtgtggccattcatgactgctctctggccttatgaaacaagcatcatagtccctggcttgcctgcttcatggggctgtggagggtgaaattcgagcatggacagggtgcagagcccggagtggcagagcactgggtagactgtgtattcccagaatgtgggaaactggaatgaatcggtccagggatgccctcctgctggctgtcagcagcccctcctgtgtgtggctgtactgcttcagctcagtgcaaagggccatctcctccccagggcacagatcagctcaagctgagtaattgtcatctggtctttgtgagctcctacccccaggcctgagtgaggggcaggaaaagagcagacaggagaagtcacagacccttgtgatacctccagtctaatccagcctgggttttcagagctgtctggaaatttagggggcaggtgggagggggctgattaaggcagccctgatttgatttagagtgagcctcatttagtgactaattaagccatcttaaacctgtagggcttcccctcttcctttgggtattatttctttctgtgatgttctgaattcagaacaatcaaaacagtataagttagtgaagaagatattttttaataactacaatattttcccagaccaccatacactggataaagcctgtatataaaactttacctaatttcttaactaattgaatgtgtattatttaacaaagcagctaaaaactattctatgaagccatgtcatgaaatatttagttcaattatggttaatcctcatcttatttcgtcttataaaattttaacatttctacctcctattgcaaaaaaaagcatttatatcagcatataataaaacatgtctagatgtcagcttaaaaatgtgtgagagagtagagggtgtttcaaaattatttcaaggagtaaagaggcaagagttttgaagatccccaggaagggtgttggctgtgcccagtgttgccattcatgactgctctctggccttgtctgtcttgtaccttctatattagtttgaagaccttttttggagaatattcactaaagaatatcaatatctaccatttcattaaaaaagaaatgtggagtttgccttttcaagttggtttgatgcttattgatgttttcagggacccagcctcttcccatctttccataccatcctgtgtgtgtgtgtcagcctatcttccccatggtcacaaggtggctgcctagctccgggtattgcttagcatgagcagagagggcatgctgccgacatgcctctcctttatgacagagatcattctttctttgacatctcactggccagaatacgtggaccaacactggcaaaggagtatggaattgcatggctgcttaaaccaatcaccatccattccctggggctgggtatattgctgctggagcaaacctgtggtcctcctggcacagaataaggggaagatactctttggtggacagcccacattgcctctacacttgcacctcagtcccaccagacccactgaggtcacaggatagctctcctcatgtccttcctccttctctgttgaactcttatgtatccttcaaagtccagcctggtgccacctcctctgggaagctgtccttggttgcccaccccctcctttgtgctctctcagtctctgtccatcggcagtatcacttccctagcctgctgactccaacagttagctctgagcatggcagccccctccataccatcagcttctcaagggcagggacccttggcacactggatagaagtagcctggtgggcaacagcagcactgaggcagcaagctgtagcaggccatctgggaatggagtgggtaccacagggctggagcagaaagggcaggctgggcagatctgataaagtggctggaggccacatagcctgggcctttcgttccaggctgagcagagtgggttttgctgtctgcaggagggagctgtggaagggcatgatcacgaccaactaaggtgaccctcctcaccaggcccagggaagactgaggcctggaaggaggctctggctgcctctgggtcttacccccaggccacagtccacccacttagaggcctctgtgagttaaggtggagagactatgagctggtattgactgctccattccccatcccgagagaggagacaaaatcagtgaccttggaaatgcctcttcgtgcctcagtttcctcaccccataaaatgggagactaagagtacccactcgatggggtttaatgaagattaaatgggttaacatatatcgcatgcttagaacagtgcctggcacagagtaaatgctccataaatactgactctcatcagtttgttatcacagcctctggggagggcgccagtgctgacttatgctgttcgtgttaaatggggctgtcactgggtgagttgtggcatacaggcccctgcactgttcaagagaccccagcaacccttgtgcttagggctcagcacatagtaaggcctccagatcatatacccagctctactccatgtactggcagctctgcccagcccataccccaaatacgcccattaactaaagggccctgcagcctataaagtgatgctataaaggttcagtgttcagcctttgaaattcaaggcctgggctgctctattgcagtacttagcatgtccccatcctgtctgtttctctctcccatctcagggtgaccgaatcccaccatctgcacctgtacatgccagccgggatggcgttcatggctgctgtcacctccgtggtctactatcacaacatcgagacttccaacttccccaagctgctaattggtaggtgaggtgtaggagggaggggcagtaccttcattcatttcttcagataatgtttactgaggactcattatgtgccagctattgctctaaacagtagagatttggaatagaaaaagaaaaaaatccctgccttcatggagcttacagtctggtgaaggaggatagacaggcaaagacagtgaataaacaagcaaacaaataggtggtggggatgctatgaagaaaatcaagctgagtaaggggtaggggcaatgacaatgttgctatctacacaggatggtcagggaagggctgtggtaactgtgggcatgcagatatttgggggaaggtattccctgcaaggggagtgacaagtgcaaagtcctctgatagggatagatttggcaaagatgtcactgtgggcaaagccaaatgagcaaggggaagagtgggaggtgagggcaggcgtcaggagaggagcgagcaagagtcccaggctctgggcctgagagcctgggtgaactgtggcatcaataactgatgtgacagaggagggggaggtgggctgtggtggggataaagttttctactgggggcatatcgagtttgagatgtcacagagacagccaactcaagtgtcaagttgggctttcatggggaggtcaggacaggagctacactttcaggaggtgggccttgtagatgacatctaaagcttgagcctggggctggctgccgtggctcacacctgtaaccccagcactttgggaggccgaggtgggcggatcacccgaggtcaggagtttgagaccagcctgaccaacatggagaaacccccacctctactaaaaatagaaaaattagctgggcatggtggcacgcatcggtggtcccaggtactcaggaggctgaggcagtcaaatctcttgaacccaggaggtggagattgtagtgagctgagatcgcgccactgcagtccagcctgggtgacagagcaagactccatctagaaggaaggaaggaaggaaggaaggagggagggagggaagggagggagggaggagggagggagaagaaagcttgagcctggatgaggtcacctggggagagaagagaaaggctctgggaccagagcttgaggtttgctaacatttagagagactcgggaaggactgcccacttagagcttctgagatgttaaatactgcaggactggggtcccaggcagaagcaacaggatgatggttggtgtttactgagcatgtgccatggggcaggctccatgccatgttccttacattcattgtcccacaggctaattcccccagcctccttattggtattgttaatatccccattttccagtgtggaccctgaaactgagaggttaaaaataataacagtaaatactcactttgtacttactgtatgccaggccccatcctacctatgtgatatattaattcatttaatccttgcaacaactctatgaggtaggtaccattattattttccctttacatatcagaaaactgaggctcagaggttaaataactggcactagtctagctcgtcaaggggcacagccgggagtctagcatctgtgcaatctcctaatcatttctgagactgcgtgtctaagggccctcagacttcgtccttggggtaaaggtatcaatccgcaggtctgcctctgtgttggggttcagcctgtgtgtctaaggctggggctgtacatctggcagttagactttgttcacactatgtccttaagtcagactgatttttaggtatcacagcatcgaattgacatttggagtctggcacactctgtgctaagccagtgacatcatggtgttgtcagggagtacagggtgtttcttgcactagtcacaggtctgcctttctgtagaaggtgggatctgagctccattaggattatccaggtgatccccctacccctagcccaggggcccccacatgagtatgaatgggagctgggggaagcaggttgagaggggagatgttaaatacaggcttcagagagccaccctgcttccatttctgaagtagctccttgtctgtagagaacccttcattaaccagggcctggctgaccagtgtcctctggaaacaccctgtctggacatctgaggagttcattttctcattctccagcaaacacataatgttctctctttaaagcacaagttatcacccgtggatggatttgtccttttctaaggaacaaagactaactccctccattccccttgttggagttatctccccttgaaaggacactccacagagccagaaattctagaacagggaaaagtggaggggacgtgcctgtgaactgcagggacagaaggaaatgggtattgggagaatggccagccctccaaggggctgatgtctggcctgggtatggagtcccacagaaaggggacctgtgatgcagcttacattgtcccgtgagggaaccatgatcctggaacccagatgaggccaaggaaatgttctctgaaaaagtcatatttgagctgagaactgaaggaactaactgggagaagggaggaaagagtgcttcaggcagaggaaacagcatgtgcaaaggccccaaggcagaaggaacaaaacacattagaaaattcagaagaagaagagtggcgtgggtgcaaagtggaggggagctggactttgggttttgtttgcttgtgcccaggctggagtgcagtggcaccaccttgggtcactacaacctccgcttcctgggttcaagcggattcttgtgcctcagcctgctgagtagctgggaatacaggcgtgtaccaccacactcagataattttttgtatttttagaagagttgggatttcaccctgttgaccatgctggtcttgaactcctggccttaagtgatcaggtctcaacttcccaaagtgttgggattacagccgtgagccaccgcacccacctggaaggtcataccacagatgtttgcctttatcccaacagcaatgggaagttgtgtgtgtgtgtgtgtgtgtgtgtgtgtgtgtgtgtgtgtgtggtttaacatgtttaacataaaatttatcatcttaactgtttttaagtatagtgttctgtggcattaagtatattcacagccgggcatggtggctcatgcctgtaatcccagcaccttggcaggccaaggcaggtgaattgcttgagctcagaagttcgagaccagcctggccaacatgccaaaaccccgtctctacaaaaaacataaaaattagctgggcgtggtaatgtacacctgtagttccagctacttgggaggctgaggtgggagtatcatgggaggctgaggagagaggatcagttgagcctggaaagtggaggctacagtgagccaagattgtgccactgcactccagccaagattgtgccactgcactccagcctggacaacagagtgagaccctgtctcaaaaaaagaaaaaaaaagtatattcacagtgctgtgtagccatcaccactatccatctccagaactttttcatcttcccaggttgaaactctgtactcattaaatgataactccccatttctccctccttacagcccctgacgaccaccattctactttctatctatgaatttgagcactctaggtacctcatctaagcggcatcatgcactgtctttttttttttttttttttttgagatggagtcttgctctgttgcccaggttggagtgcagtggtgcaatctcggctcaccgcaacctctgcttctctggttcaagcgattctcctgcctcagcctcctgagtaactgggactataggtacctgccaccacgcctggctaatttttgtatttttagtagagacggggtttcaccatattggctaggctggtctcaaactcctgatcttgtgatctgcccacctcggcctcccaaagtgctcggattacaggcgagagccaccttgcctggcctatttgtctttttatgacttgcttatttcactgagcataatgtcctcaaggttcatccatgttgtagcatgtattgaaatttccttcctttttaaggctaatattctactgtatggatatgccacattttgtttatctattcgtctgtcagtgggttgcttccacctcttgactcttgtaaatagcactgctatgaacatgggtgcattgaggggttttcgacataatcataataattgctttatggagaccagcttggaggagaacaagatggggaggaagtgtggaaaccaatgagaaggctctcagggtatagcgggaatacagaggacgcatgatgatgcctggacttaggtggtaccacagggatggagagaagtagatagagtcaagctatttaggacgtgaaatagacagcatttgttaatgggagaggtgtggggcgagggagaagaatagagggagaaggaggagtaatgggagctcaccagcagcccccatgttatgcctctttccttccttttccctcttctctcatcaggcattcagcttttgctgagtacttctgtgtctgacaacaggctgagcactcagcactgcaggacaggactatgcaaaaaacctctgggcctagtcctgggtgcactgctaattccctgtgtgaccttgcacaagacatccaagctctctgagcctcggattccccacctgggcaggaagagtaagtccctgcctaagtcatagggttgtaatgaagagcaaagcagaccatatctgttaagtgttagggacaagacaagcatgaggcatattttcaagtctcggctcctgtaggcagctctcactaagggctaaagggcttctgatgcctgggatagaatctgtccggcagagtggagtggaggcagggggacagccttcagctgtggaattcctccagtcctagagaccagcctgagctgggggacattattccagtcctgaggcatgagagcagaaggccgatgcttctgccctccatcctaatgtcctcctgcagggacccaaggtggatggcatcgatccccccgggtgagctcagccctgggcgcatggtggggcccaacatctcaacctgtttcctaaccctgagccaggcaggacagatcccagatttgtgcccaagagatgctctggcatccatgcccaggcccacatagggatagagggcagggtgaaagtctctctccctcactcgggtcctctggagaggggctctgtgtcatgaagctgaccttatccgcatctggtctaggagggaggagggaaggagctgccagtgctaaaatctcccccaccctcaaagggggacttcacaggttattgctggttttggttgttggaagctgacagtgatttattggcagattgaagtgagtgtgtgtgcgagaatttaggatagaatctactgatagcttctgaggtttaccttccccaggtcttaaatctggagataataaaaatataacagctaatgtccaaagagcacccgctgcgtgtgaggctcactgcactaaatgctttccatatgtttctcacaagaaccttctaggtagcactattatgattcccacttaatggatgaggaaactaagctctagaaggctaagtgactaatccaaggtcacacagctattatgtcacaggctctgagcccaggtgtatctggctgcggagccaccaccactaacccctgtataacgctgcctcacagaactgtggctggctctttccgtatcccccatgcccctgctccatcatcatgctgtggtgggctctgaactgtgaggacagggatccaggctttcaccctctctctgtccctagctgccagtgcacttgggcaaggtcacatcctatttctgggcctcagtttcctcatctgtaaaatgaaaggctggattgaatgacctttaagatttccctcacttggaaattccacaagtaagtcattatagcatggagcttgcatgcatgggctccagcgtcaggccagcccagctctgccagttaatgggtgtgtggccttggatctgttacctaacctttctgagcctcatttcctttgtctgagaaattgggggtgacggcagtgtactttctttgaaaagttatggtgaggaatagataagatcatgtgtttaaagtgcttacttggcacagtgcctgtaacttagttaaattcaataaataaatttcccattcttcccatgatcatttatttttaagggacatttgtctgaccagtttgatttatgagattattggtgtttttcatgaatgttaagacgtacgtgcgtcatcttagagtcatgtactctgatatattcacacgtgcacatccacttactcggaaatgtacacacccaggcacgcttattctgtctccttctctgccacatacttgcacacattatgtgagtgtacacacatgatgcacacacgtctctgcgatcttccatctctcctcggcagccctgctggtgtattggaccctggccttcatcaccaagaccatcaagtttgtcaagttcttggaccacgccatcggcttctcgcagctacgcttctgcctcacagggctgctggtgatcctctatgggatgctgctcctcgtggaggtcaatgtcatcagggtgagggtaagcaggccacctgggccagggtggggtgggaagcagaggctctggcctctgtcctgccctgggttcaggcccccaccctgcttctcagccaaactgagaagggatcagcttgttttacccgcccgtgtaaaggggagtggggccgtggcggaaatttcaggatagacactgcatctggcccacgtgtgctctaccccagggtcccagagggagaggggggtgatgggtgtgttcgctgaggttggcggatgactttccgtagaaagggaagataagcatcaggcactggcctctcctactttctttcttcgggggtgggggactttgctttaatgtattcatatcgtcacgctggtaaatgaatgagtaagtgttttgttttcctttctgtttgctcccgcctccctctctcttcctcaccccagactccaaccttccccttcccctgcccctacctccccaggcagcccagactaatgaactcgtttgtctttcccatgctttgtttttattagtataataccatatgtgtctgtctaaataaatacctattcaggttttttcctctcaacacaagtgaatatgtaggtttcccccacggtatttatcttgtaagaatgggatcatattatgcagttttctgcactgtgcttttctcacccaacaaatatctcttgggactccctccaagccatctgatatggctaattccgttttcttaatggctgcataatattccatcgtatggatgagccataatgtgttcagctatttctctatggatgggcatttactttgttgccaagttcttgccttcatgaataatggtgtgttgaacatacttatatatttatgtattgctgcttttatttctatgggagagagtccaaggaatggcgttgctgggtcaaagggtctgtgtattttaaattttgatcagtgttacatattgccttccagaaagactgtaatctgccagcaatgagtgagaaaaccctttccctgccttccaaccagcagtgagggctacagccctttcgaacttggactgcctgcatttctctgactcttctgcttttagttggtgatctgcagggcacaaagctccttatgtgtccccccatccagtgaccctcacaggaaccctgtgatgcaagcaccatcccctttatagatgaggaaacattttagatgaggcttgtccaaaaacaccttgctagtaagtggaggaggcaggattcaaaaccaggtctgcatgacttggagttctgtgaactgtatatgaaacatggtggtatccttagatctgtggagaagatagcatatgagagattcctgctcctccccaacccaacctaaacccaacccagcctagccatggggggttcaaagtcgacctcaatgagcagttacaaagtcaggatgccctgacattggtggccaagaagtgttggggaatccttttcctggtaataattacaggcgaaagatggccccatctgttagagatcaagtgtggaatatcacaaccccagatccttgctggggcaaggtagggagtggtgagaagttggacttacccatcccccatggcccatgtgccccacagagatacatcttcttcaagacaccgagggaggtgaagcctcccgaggacctgcaagacctgggggtacgcttcctgcagcccttcgtgaatctgctgtccaaaggcacctactggtggatgaacgccttcatcaagactgcccacaagaagcccatcgacttgcgagccatcgggaagctgcccatcgccatgagggccctcaccaactaccaacggctctgcgaggcctttgacgcccaggtggtcagtgggggcacagccacaccatctattcactgccttctggtttagggtcacagagagggacctcaaagggcattaggtcaaaatcctggtgggacaagaggggaaactgaggctggtgaggggaagaagcttgccttaagtcacacagtgaaccagggacaggtgcagggctgaggattcataggacaggcacagttggaatggcccttaccgtttaggtcgtctagtccaaagtccttatccagatggggaaactgaggctctgagaagggaagtgaccccactggactctcacatccctgtgctctttcctctgcagcttactgactataaaggttggagtgttcacttgatttggagcaggggtgttagtggcctgatccttatggtaactctatgagttgagccagacaggaatctccccatatcactgaggagcaaattgaggccctgagaaaggctgtgacctgcccagagctggccacagctggcaggcggcagaggcagtctcctggctcccagtccagtgctccttcacttcctctgccctcgcaccagggcagttgctgaggcagacacggtggcaggtggtaatgagtgagtgtggcacatggccacctcctcattccagtgctgtgctcatcacatagtccctgaccagctgtgtgaccttgagcaatcatctggccttagtttccccatctagaccatgttggtgttgatagggccctcccaactgtgcacttgctgattccatgatctcttcctggagttcacctatttgcagaggatgtgaccactgggtttccccagacaacaggagctaggggcatcctgggaggctaggcccagccgtgaattagccctcaggcactctgacctggccatggtctctctgggcagcggaaggacattcagggcactcaaggtgcccgggccatctggcaggcactcagccatgccttcgggaggcgcctggtcctcagcagcactttccgcatcttggccgacctgctgggcttcgccgggccactgtgcatctttgggatcgtggaccaccttgggaaggagaacgacgtcttccagcccaaggtaggcagccccaggggtagggtaaggcaccctctagatggttttcagttgtttctgagagtgcaacaggccaatgtgtgtgagccatggccacactggagtggctcctcacacatgcgcaaagcccatagcagtatccccaccacagaatactctacatctggtcaacagaaatgccagagggcgagcctatgccccaagggtatcctactctcctctcaccgtcactaccatagtacctctcccggtagttaggtcagtccgaaaactgcaggaagtgcttttgtttgtccagtgtctagagcttctgtgacttggatttgttggctttcagttcatgtcatcttagtaaactctttaaaagttttcaagatctgtcttcttcagtcctgtaaaggctggcacttgagctttctgcaggggcatcttgggagctactgtcagaggagagagaagtgggaaaccctcacgagtggagctttgtctctccccactccaaatttcattcaaagctgcccgtagttttattaatatgttggacttttccattaaaatttcttttttaagaaaagtttccatggcttaaaaaacactggagacttattagactagattatatccaatggccttggcagttgtaacgattctgcaaactgaaatttgttggagctagaaaacctttccccggggttatttgccctgcgtggggccgtagcatccacttcgggggctgggcagactgtgctctgttgtctgtttccttgcagccgtttaggtttaaatggccacaaaatgaaaactttttcacccctaataagtttcagagttttagtttccaagtgaggatgtcattataacattttaaccacagacagtctgaaaataatgcagagaatggggaattagggtttttaataatttatgacaccctttgcgtaacatttgttcatctcatgagctccaaaatcgcagccagcagttaatcctcaggaggtttatgttcatttttctggagacataattagtcagctgaacagttttggccacagatatgagatacgttgagtctgatttatgcagcaaactttcattgaacactgctgtgtgccaggcctgggttgggctgtgggaatatgaaagcaatagttatgatgaggatgattaacaatattaacagccacttactgaccacataatacatacctggctgtgtgcaggagttatccatgtgttatttaatccctaaaactatcctttggcgtgagtatattttgcaacatctttactgtggtatacctcaaatactgtacagtttatgagatgataggtattcttatccccattttacagatgagaaagttgaggctcagaaagtttaagtaattttccccagggtctctcagctagttaataacagaggcagaatttgaacacaagactcactccacagtctgggcatttacagccaggaagctaaattgactattattatcaagccatcacctctggctccaaggattatgaaatccaacagtgaggagagaaatcaaaataaaatacttttatgctatgtgttacatgtgactcttaggaggaatattcagggaattgtgggaaaagatagtgattaacttagccagtggtcatgaacagcttcatagaggaggggatgtttgaaaggggtcttgacggatgagtaggaatttgccaggctgccatgggaagatttcttgctcaaccaagaatgcaaggaccacttttgcttatttaaactttgatggcttttgaagccatatctggctttttgagcctctctactttacctggcccataaaagagaggggaagcggctgcttctcttgtctacaggagtgtcacctttggctctagcctgaccataggctaccccagaatacccccattggcgatcctgaagcagcatggagccagttgttaatatcagggggaaatggcacaggccagagcccttatcagagtgtccacaccacgctcttcttcctgtgtttcccaaaacccttgtgggattctgctaaggagagagctctgaggcaggacgtgccaaagagatggcgaaagcacttagaattttagttcatctgaacgttatcattgccgtttttttctctttgtttatacacaaaccctggggtttattaccgtctcattggaatgctcttgtcccagttacttagcacacaaatccctgagacagatggccctgcctcagtggcagtgggccttatcagatttaatattttttccctgcagcccaaacacaatcagaaaatttccgacacagaaacaagagttgaaagtaaatatagtctccagtgtccgcaacaaagaactctccatcatgtggttgcctgggatgtggcttaattctcatgtgggcttctgagctcagaaaatgggggaaagggatcatttactgagatcatttggttcatctcccagcccccaagccattctaatccagagagaaccgagtgctattctggtctttatgaatgacaaagaaggaagctccctagctacatgttgcagtgtttcacagtctgggagaggaagccgttttttctgcccagcctgaatccatcctgcagcagttggcacagcgaggcacctgtggtttattcatcatcactcttccttcctaagatactcagagttggcaagaaacatgtcatccttggtatccgcaaggacgaacatttctgatgtcctctttagttactgaaagtgtctgtgacttgccagatctttgatgctcctgtcaccccgctgccactccccagggaaagctgggacccaggttgggctctgcctatgatctatagctctttccagcctcctctccaacccaacccctactcccaatctgtcacctcccatggatgccactgatctggctgaaggacaagagaattagattcataatgagctgctggtgtctgaaacctgccagcactgccctgggctatcagttgagccaaaggaagaaggaacagtctgggtttgatcgaagggctaaagcttcaaacagcctctaagtctcagtaggaaaatgtgtaggtttgggagggtgtatgtgtttccgaatgagttcccctaagaactgcttatggttctatatgtgtgttctgtttgtccctgtgtcttttggtgtgtctttttctgcgtgtgtgtgtgcatgtgtgtgtgtctatgcccccgtttggattgccatatttgtggctatcattatgagtgacttaatgagtgtatatgcattggtgtttctgtgactttgtggttttgatgcatgggctggcctcttcataaccatgtccatgcagctggtctggcctagagtacctgccttcaattcactagctccttcttggccatcaagactctgctcaaatgtcacctgctccagggagccttcacctggttgaattagatgccccttatctgtgctcacataacatcctatcaaagcgccctgtttctttccctgacttgatcctctgtcccctattgcctgacctctgtgtgcccagcactcagcccactgcctgacacccaggagatgcacgggaaatggttctgcaaagaaggaataatgcagcaattactatatattgagtgcttacacttactgttttttcacatgcactgttacattgacttctcataacaactctctgaagtcccttcatagcctcaccttacagatgaggaaactgaagctaagagaggttgaggaacttacctaaggacacagtggctaatatatgatgagtcaggacctctaagtccaggctcttaaccaccgtgtcaaacagtcttgtatgaatgggtaggtgtgttggtctctgggtggccaaagataattttattctttacccagggcctcccggggctgggacctacggacaactcaccttttgacacctgccaaaataggaaacaagagtccaagtgatcccctctcctttaagcaccagagaacatgtgaaggggacctttccaatcatacctctggcctggcagagacaatggggctccaaactgtagagtcgggagtgctgggttttagtcctacctctgcagctaactcatttattctcctcagcagtcacattctgcaagcctcaaatgcaaaatgtgtaataacttctgtagaaagtacatgggggcatgaagatcattggcttgattgcttttaaaaaatcggtattgagcactactggggaaatccctggaaacaaacacaattcttccctgagagcttgtgaaaatgcaagactagggcctatgattttccaaagcattttcttccaccaagtgtcaggttgtaggtccttggtcttttctctcttgccttggtacctgcagggtgctgaccagtgctatcatatcccctccccgtttcctaggaccctcttctcggtagactccaacagggcctgccttccttgggcagcatggcaggcctcttggctagtctagtacccacttcttttttttttttttttttttttggatggagcctcactctgtctcccaggctggagtgcactggcgcaatcttagctcactgcaacctctgcctcctgggttcaagcaattctcctggcccagcctcccaagtagctgggattacaggcatgcatcaccatgtccagctatttttttgtatttttagtagaaacagggtttcagcatgttggccaggctggtctcaaactcccgacctcaggtgatctgcctacttcagcctcccaaaatgctggaattacaggcatgacccaccacgcctagtcaggtacccacttcttaactgaaacttagctattccaggttctatcccttttaaaccaactctttgaagagaggtctaataatgacccaatgacttatagctgcagtgagatttttattttaacaggtcacaaaattctcaatccacaaaagtagatttctgaccctaggttattttgttgggggcggagagaggaagtcaaaggttttgcagcctttagagctgcaaaaccagaatttgttgttttgttaaaaatgcacaaataccgacgagtatatttaagtaacacccatagtctaacgaacaaacatgatcagttggcttttccagccctcattctccagcctgtgtgttttctgctcattgtaacacagcgtgtgtgtggcattccatgtttctccagagctttcatgagaatcagtggtcttggatgcatagtgttcccatgagtaccttaattacctaaccattccctgtggttggaaatttatatgggtttttgcattctccttctgctctgaccccaaaataaatgtctgtgttcatacagctattaccttatgtgaaattattttctttgggataaattctcatgatgtgttgttgctttaaaatagtggactccagtctccagagctgcgtctctgcagaggacagtgggacagaagaatcccagggcatgttaaaaaggaccgggtcttcctaaacccacatgcctatatttctgacccagtaccagccaggggggcaagtttccatcccccacaagtcacaaacctgtaactgacactaggatgcttaaggtcaaaggcctggacgaggcctagacagtgggtctggggtagtgtttttgacatcactcaggttcatgttcacatgttgtccccttaccagcatgtgaccttgggccagccactaaccctactgaaactcctttttttcatgtatgaaatggggctaataatggtaccctcctcattagggtattgtgaggatagagttttgcacctgataaatattgtctcctgccccttcctcccctggaaattcaggtctctccctgcagcctaattttaaggcccatttttctgcttccagcccacccctgcccttctaccttcgacctcctccctctgcctctccctctggtgcactggcaaatgggacagagagcctcggtagggccttcctcttagagtcttgcacgcatccctcagtggtctccctgtggctgcttcctgctgccaccaacagatacagacccctgtcgcacagatcatggtagagacagtggtgagcaggaccagacagctccagggagcagtgagggctggcttagagaacctctgttaaactgagaggccaccatcaggaagctctgatccaagatccaggaatccctgactctagggaaaggcctccaatgagagcctgggccctctctgcctgattctgattgtggatgtgccctcaaactccttctcatcactttgttccatccctctttaccctgcagcagctcccacaccctgccaaacaggatgcacagtccagggcagtgtctgagaaagagcagagatctgtcttcatggaaatattgatgtggctctgctggggagcaatggatttatcaagatcaaagttttcctgggagttattgatgcttaatttggaaatagacacactgttgatccctggtatctttagcaacaaagttaaaatgtttgtttttcttcactggttgccatctgagatcttgccggaagtacacaagagaaccttaaatttaacaggaggccctgggagcccatgaggctggcgggcttgggtctgaaatcttttcagtctcttgtaagtgatgagctctcattctctcctgagagctctacggtgccatgttttccactggccttttctgctcagtaattgctacattacaggctgttggtaagttcggaacaagggagctgctgattccatttctgtagcagagaacatgcaccgtgagacttgttgtaccagttcaggttttaggtgctctatttattcttgccccattcagaatgctctcccctgggtctgtggccacaatgctaagagtcatatttatgggcctgcagttgtaattgggccccattctgttcccccaagtggaaagatgaacagggtgtaagcaaccttccctgtagttagaaaaacgtttagttggatttatcagtctgatttttcactcataaacaattgcacaagcctttgcaagcccagagggtcttgtaataatgatggccgtggtccattatggcacagtgatgtgttctacggtggtcattttgctggcaatgacagtcacctctgaacttctctttccaacagacacaatttctcggggtttactttgtctcatcccaagagttccttgccaatgcctacgtcttagctgtgcttctgttccttgccctcctactgcaaaggacatttctgcaagcatcctactatgtggccattgaaactggaattaacttgagaggagcaatacaggtacttggatgattattttttcactttgccataagaaccattattaggaataatgtccatgagtgttattcatcctcatggacactcaagaataattctgctgtaaatttattttttgttgcccattaacgatgttttaaaacagtaaccattgacaaggcagtgtgggatagtggaaaatatcttgggctgaacttgggagacagtgtagctctggctctggttctgccttggactgggtctgaaaatccagctgctcagcccttggcttgaaagtggtagacgtcactaattgatcacagcactctttctgaccaagggtaaatgcaaccttggaatcctctctaagtggctgttccagagttctgctaccagacagtcttctttgggtgtgaaaaaaggaatgtgcttgacatacaaggtctagatagcctctaagacagggtcccctctaagatggggtattggtccatggcctgttaggaactgagccacacatcaggaggtaagcagtgggagcaagcattactacctgagctctgcctcctgtcagatcagcggctacattagactctcataggagtgcgaaccctattgtgaactgtgcaggcaagggtctaggttgtgtgttccttatgagaatctaatgcctgatgatctgaagtggaacagtttcatcctgaaaccatccctctcccccaggtccatggaaaaattgtcttccacgaaaccagtccctggtgccaaaaaggttgaggaccactgctctaagttctatttgaacccttaagtcttgctcactaatgagagtgacctatttggtctgttgggtcacttaagtctaggctcttggtcctgccttctgtgatttccttcttagagtttctggaaagatgatcaaagccagggagtgttcagggcccctctgaagaaggtgatgatgagagttgtccaagtcccagggtcttcactaggattttggttcagctatcagactagagagacatcctgattgagagtagtttaaatgggatagaagtttgtttattcttcagatagagtcagggctgacacaggagctactcaatgatcagagacctggcttcttctgtcatgttgctctgccagccttcttttgtgacttttgtctccatagccatggtgggtattgaaactgccactatatttacatttaaactagccagaagaagggacaagaggagggaacgcattttccttttaaaatggtaatacctgatttgcacataccctctcgcatcccattggtgagaaagtggccaaatggccgtatctagagagtctagaaagagcttggtctttattcttgacagctatatatgcactgctagaaattctctgtgcaaagaggagaatgggcattgggaataactagatgcagctatgcctagtgatgtccatgaagttgtggtaaaatcctgaagctaccttgttctttggaaatgttcctcagaatcattaacattagtcatgtgggagacaggagaagaagctctgcagaaaagggaccgagaggacaaggatatagcttgggctggggacaatgtcagagtccaaactctggctatcttggaatagtctgtgtgaacggtgccctcccaagttgtgcagtgcacaacctgtgcagctatatatggcaaccctgcccatccccagtggtttctcactgggaaagcagagtatttcctcagggatgtcattatgtgacaatagtggaaaaagcccaggaaaatctaagaccttctaagactcatgggggcccagagctgggaggaaccaagctgttgctcagttcagaaaacttctctagaaatcccagcctctcctcacacccctccagtgacaggcagacttgcaccaccacaagcaacagccacttttgtggttgggcagttttgtaattaaatatactaatgtgtgtatgtcataaattacattttccaattatgccaaaagagccaaaaatggttttttaatggttagcatataatcgtttttatcaaattgcttgaatctttcatgttaataagagagattcattactatgccacaaaaagcaaatactggcattaattatagaaacaaattaggggggtggagcgcaatggctcatgactgtaatcccagcgctttgggaggctgaggcgggtggatcacaaggtcagaagtttgagaccagcctgaccaacatagtgaaaccccatctctactaaaaatacaaaaattagccaggcatgttggcgtgcacctgtagtcccagctactcaggaggctgaggcaggagaatcgcttgaacccagcaggtggaggttgcagtgagctgagatcgtgccactatactccagcttgggcgacagagtgagacttcatctcaaaaaaaaaaaaaaaaaaaaagtggctcatgcctgtaatcccagcactttgggaggccaaggcgggtggatcacaaggtcaggagatcgagaccatcctggctaacatggtgaaaccccgtctctactaaaaatacaaaaaaaaattagccaggcatggtggcgggtgcctgtagtcccagctactcgggaggctgaggcaggagaatggcgtgaacccaggaggaggagcttgcagtgagccgagatggcaccaccgcactccagcctgggcgacacagcaagactctgaaaaaaaaaaaaaggaaagaaagaaggaaaggaaaggaaagaaaggaaaggaaaggaaggaaagaaagaaagaaaggaaagagagagagagaaagaaagaaagaaagaaagaaagaaagaaagaaagaaagaaagaaagaaagaaagaaagaaagagaaagaaagaaagaaaaagaaaagaaaggagttagggagaaaaaaaccctttctttctttcttttggagatttccggaaaatgtacccttacggatgagagcctgtgtcttcatgggttagagaataaccacgctttgtgcataaaaagttattaagcacaattcctgaattatacataattactagctgtcagtcagttgtgcatttctgtgtatgctggtcttcacttaataagactttatttcacagatcacttggtgtccctacttcactgaaactaggtgattatcttttgaagtctcatttcacataacctaggaggtatatagatttctttaaaaatgtcattgccattattttaaaccttacccatggtatatataaacttacagaaagacagaataggttcattattttaaaccttgcccatggtgtatattagctcacagaaagacatagaataggttcctgccttaagaaaacctgacccacaaaaaagcctgggtttacacaaaagaggaattaagggcggggagcccaccttacaacagaatgaataatagaattttatccaagagcaggcatcctgaggacatttaagacccggatgcatttttccttgttcaagagcacacatccaaaaattgcagtctttctgcgagtcatgatcactctgcacataaagcgtttaggttcagagctcggggaggccattaccatggctgctctctgtctgccctgtgagggtccttggggtggctgcactctggggatggtgctggggctgactgactcacgcggtcgtgtaacacatcagaccttccaaagtcgaacccttgttttgtttcaaggctcaattatgacaggacttggtctcagagcagatcccctccctaggctggagaaggccactttaaaacagatggcctgccccacttcatcatttttatggctctgatctgtgttctccactggcctctggtaaatcaagaatacaagtggacatgaagatctgctttaaaaaataaagaacagaccgggtgcggtggctcatgcctgtaatctcagcatttggaggccgaggtggatggatctcctgaggtcaggagtttgagaccagcctggccaacatggcaaaaccccatctctgctaaaaatataaaaattagctgggcatggtaggcacgtgcctataattccagctactccggaggctgaggcatgagaattgcttgaacccggaaggtggaggctgcagtgagctgagatcatgccacttcactccagcctgggaagcagagcgagactctgtctctaaataaataagtaaatgaattaaattaaataaaaataaagaaccaattaagtcctgtctacaggaaaaggccttacttgctggagaagtagcttgctgtgctggagtagactagtaagttggaacggtgatacagtaccaccttacagagctgctctagggcaccatggggactgtctgagaagcccctggcacactgtaacaggtggcatctggtgtggtgatgatgatgagaatgatgatgaatgtgaaacactctgctctcatttctagaccaagatttacaataaaattatgcacctgtccacctccaacctgtccatgggagaaatgactgctggacagatctgtaatctggttgccatcgacaccaatcagctcatgtggtttttcttcttgtgcccaaacctctgggctatgccagtacaggtactagatgggctgaggggaagggaggggggcagcaggacacacaaccagaatctgctggtccatggccagtaactaggagcacaccgtcttccactccatgcttgcctgtacctttcacacacttggctataccacaggctgtacctctgggtccctcctgtcccatactctgcaagcactgaccatctctcttaatgaccagagaaggcagtatcattaagactttaaaaatggagccaactttataaactatagaaaaatcaagccaggttcaggggctcacacctgtaatcccagcactttgggaggctgaggcaggaagattacatgagcacaggagttcaagactggcctgggcaacacagtgagaccccttctatgcagaaaaaaaaaagaagaaagaaaagaaaaatcgtacatggaatgcccacagatcttaaaagctatgttgtagcaaaatatttaattacatcaaaaagtgttagtgatgtatttttaagcaaaaagagtaagttacaaatagtatatgttgtatgcttactactaaactggaatatatgttatgtatacatttgtacagattcacacatgaaaaagaattggaaaatcacatagtgggattataagtgatttttattttctttatgtgtttctaaattctctaataagcgtgtataagatttggaaatcaacaacatgatacttttagcctaggcaacaaagtgagaccctgtctgtacaaaaaattagctggaagtggtggctcacaactatagccccagctactcagaggctgaggtgggaagattacctaaagtccaggaggcagaggttgcagtgagctacaatcacaccactgcactccagcctgggcgatagagtgacaccttgtctcaaaaacaaacaaaacctggtgttttttagccagatgtggtggtgcgcccctttagtcccagctacctgggagtctgagatggaaggattgcttgaccccaggagttcaaggctgcagtgagcaatgatcacgcccctgcacttcagcctggacaacagagagactcctgtctcttaaaaaataaaaataaaaacgttaaaacatggtatttttttaaagcaagacaacctttggtgctggctcaggaagaggtacattaccccccaataatcagaggagaatcgtcagcatgattgatctgacctcgggcttcatgtgtcccatctcccacccggagctcttccaccacagagtctgatcctgtcctatgcctgggactaaatcttcaccctggtgttcaggccagaaaccgaaatcccagacccattcccagagggcgggaaggttccaccgggagagcttgatgtagcagaaagtgacttgggtgagacaggctgattcaaatacttaacctctctgagccttggtttctttatctatgaaatggggaggctgcccaccctctggagttgctatggcaattcagttagataatgtaagtaacacagcaggcagagtggcccccagagtcttcacttcgtaaatatcagatccctctaccttgcacatgtttggtatgagtgaggtgttaccaatccagaatccattgcttcttgggataaagattccataaaccttcatctccagtgatttgtattggtcctccttacttgtaaagcttagagtttaaaaatattaaaagaaaaaaaggggagaggctcccacagggacacagctagacaagatgagatgcagggaatctgatgttcttttttatgggaacagtcatatatgccatcccccattaccacctacccatgcccagactgcccccgctccattctgccaagacagatcaatgactataaaagctacaaaagggcctggagatctcatctagtttagttaccaaccaaccttttatgcacaagactttctaagctgggtgtggtggctcatgcctgtagtctcagccactcaaaaggctgaggtaggaggatggcttgagcccaagagttcgagtccagcctgggcaacatagagagacctcatctctaacacaattttttttttgaaacatgaaaaatgaagatttctgaccatgcttctctcattagttaacactttgggctgtgagggtctgatgcagagagacacagcctgggaggatcctaacatgtacacagcattcaaaaggctacaagacactttctgttgtgtccccttgaacaagcagtttgtaagattttgttggccaggcatggtggctcgctcctgtaatcccagcactttgggaggctgaggctgatggttcacctgaggtcaggagttcgagaccagcctgaccaatatggtgaaaccccgtctctactaaaaatacaaaaattagccgggcatgatggcgtgtgcctgtagtctcagctactccggaggctgagacaggagaattgcttgagcccaggaggcggagactgtggtgagctgagatcgtgtcactgcgttccagcctgggtaacagagcgagactcggtctaaaaaaaaaaaaaaaaaagaaatcaggttttgtctactaaacctgctgcacggttaccgttactagtactcacagggtttgttgcacatgcatcgttgctaatagtgctaactaatattaacagcccttgccctatgcctggccctgtcccagcccccctcccttgtataatttaacccttgcactgggggtagagattttcatatctactgatttcttacctttgctcatttatcatggagtgtcctttggttttctgtgtttgtatatacctttaccacttatagatttgaccagcactcaagaaccagtgttactcctgggagttaatacaatcccagccccatggcaaagaaactcatgtggttaggattctgtgtgcagcctggttagccacagggcacgtaaggctttttataatattgacatgagtgcagaagccccattcccgtgtaagccctgagggctcttgtttcataatctttttttggtcacatgcacacagctttattgagatataacccactcatttaaagcatacaaatcagtgggttttagtgtcctatattcacagagctgtgcagccatcatcacaaatgtggaagttttcatttccccaaaaagaaacccgtacccattggcagtcactcctcatcttcgcccccagcccttggccaccgtttatctacacatacttttgaaaggctagtgaaactttctcagaaaaataaatgcttgctcaaacatttgggctataatttcaggggcttcatgggtgcccccctgacatttatcaagaacaccaggttaaggaatttagctataatggaggcctctgtgtttcccagtctcctgggtatcagaggcccagagagggcaggtgccttaccctgggccacgcagtgaaccagtggcagcaccatactcacacatctcctttctgcggttccccagtgacagagttctcaggaagctttttcatttattttctgagaggagggtaggccatcttgtattgatctccaactatatgccagccacaattctaggtgcttatcataaaggttcatttaatcttcacaatagtcctgcagagtggacagagtccttcagagtgggcattataatcaccattttaaagatggagaagctgaaaaccagagaggttaagtaactcacccaagactgcacagcaaaaggctggggctttgaaactcagggccacagactccaaagactatgtcctccccactatgctagatttttttcctaacctgtgaataggagacaaaatagtccttttatttctcacagttgctttgcacactcagaatccatgatttcttctgcatgagggccattcagacctgtgcagaagagagtaatggaccaaggagtcttgggagcacctaggaggaggggatgggggagcatgaggaggagccagggaacagcagcagctgcagcaccagctcccaccccagcctctgccagtctcttggaggtggtgtgggtgcagacaccggctcacaaggtgccctgttagtgagcttggggtgccatgggagccttcttgttgtcaggcccaacccaagctggctgaagaacaccctgatggcctccatttgagcacaactaatgaaggactggatgccagagataagtccaggagggtgatgctgcagggcaggccagggaagagggtacttcatctctatcatggtcctctgcccatccatgccagcatctaacacctgttaaacactgggaggcaggtggtgaaggggccacttcccagcctctaagatacctcctaagccaggaggcattctgtgattaaattacagggcctcccacttactcctttatccttgaggcggtgctggaagcttaatgccaatctggtgtagggctctgggactacaggaccaaggcaagcagtcctttctctctctctctctctttttagctaaggaagccagcacatctgttctttgagaaaaagccctgtatttagaggtgtctgcctttgaaggcaacctgagaaactgtcatcttggcgctttggggactggccatttacacttctcataaatattcagaagtaggcagtcatttacataaagctaaatgcagaaggaattctcttttcagggaatacctggcagattcattaaaaaaattaaagaaaccaagagcataagaatgaaaagcgaattctcggaccccaggctggttttttctggcatgggtgcagtaactttgcctctttgctcagttatcacttttttccaatgacagtaaccataagccctgagagccagcaaatagaacaaaaggtgctgtcacaaacattgtgcaatctcatctctgagatttccatctggaaaatagactggagagagttaaggcttcaaccagccttgcagataaatgcagttagttaccagcccagcaaccctctgcttgcatgagagcccattatgctaacctccttttgaaattgctttgtttctcctccttccctgcactccactccccaagataatttggaaacctgggcaccaaggcttgtcccactctaggggactggggaaacagggattttgccagcacctcctggcagggcaaccatcaggtcaaagggacctgacccatgaccccttcctcagatcattgtgggtgtgattctcctctactacatactcggagtcagtgccttaattggagcagctgtcatcattctactggctcctgtccagtacttcgtggccaccaagctgtctcaggcccagcggagcacactggtgagtgcccaaaggtgtgtgtgttttgtccctcttcccctccttccctcgacagcagcaggtctcctcccacacacccacactgtcattgactttgactttgactttgagtaggccacttcacctgtccaggcctcagcttctttgtctgggaaatggagtcaatgggggaggaggctgcctcccggtgaggacaggaggcgggcatggcagtgacagtattgacactcaggccttcctctcgggtgggagacggagcagaagcctctcccctctgactcggggacccctgcaggagtattccaatgagcggctgaagcagaccaacgagatgctccgcggcatcaagctgctgaagctgtacgcctgggagaacatcttccgcacgcgggtggagacgacccgcaggaaggagatgaccagcctcagggcctttgccatctatacctccatctccagtgagttcaccccacacagccagccctgggtgctgctgcgtacatgcaaggagagggtgtcagagctcgggtaagagggggtgcagggacagaagcaggaggccttgagattatccgactcagtaggggagcctcaaactggctctgatagctaagctcccagaaatcaaagtactcttcattcatttatccaacaaacatgcatggaaagcctgctatgtgctggacactgtgctggccctcaggatacagtgatgaggaagagagatgaagtttcattcctcatggaactgatatgttattgacagacagcagcaagtaagtaaatgaccacagttttgaactctcctaagaatgaagactttttagtaagtcagactgagctgtcattgccctggggaagctacaagaaagcttccatccacttggggctatgcaaaagaaaaagactagttatccttaaatatcagaagcccaggctgaaggtactcacaggtgtagggactgaatttatattaaccaagtagtttgggaaccccaagccaaggaagaagaaaaagaccaaaactggtaaaagtcctagagtcccatatacttgaaaccattttactgagaatgtaaaacttttttttctttttttgagatggagtctcgctctgtcacccaggctggagtgcagtggcaaaatctcggctcactgcaacctccacatcccaggttcaagtgattctcctgcctcagcctcccatgtagctgggactacaggcacacaccaccacacccgactaatttttgtatttttagtagagacagagtttcaccatattggccaggctagtcttgaactcctgacctcgtgatccacccgcctcagcctcccaaagtgctggaattacatgcatgagccactgtgcccagcccaaaagattttttagaaattgaaattttagttatggaaattaattcagtgaacaatggtcccctggtcagagtgagggcttacggaggtcaggtgatccatggagtcctggcccaagtttatctcacagttggtctcgtggctccgtggacccatcccatggtggttacttcccaagtgcataattgggatgtagatatttagcaaccagctgacttcacactagttccctgacctgtccagtctaagagtcattatggccaagtggaagcccctggaaagaagaaaacaaaaaagaaaccaaaacttactcagtgcacaggttacatgaatgagtatagctgaagagagaatttttgaattagaagacagatgagtggggattacacagaacgtggcaaggagagtaagttggtagaaccattttacagatgggaaattaaggccagaggggagtgtgttcctgagatccctcctgaggttagtagcatggctcggactagatcctccaaagtctcttaactcctggtctcaggctattttccacaaagagctgggggcctctgtggggtgaagaagacttaggacaccatggggcaccattatgaggccatttcctcctaggagaaaaaaaatctctgggctctgaaaggagtagaattagggtaggaaattaagagaggctaccgaccacctcctccaactaaaattggttcttttggtgccaggaagagacacacctggtgggggagggaaggtggtaatggagggggtgctggtagtgtctcccagatagacccatccaacaagtctcatggagaatgagacggtcactcaggtcatctgcgtattcttggcattcttgctgcctagagagagagtctgatggagctaggtggccaccaagctgtcccactccccaagacagtttggaaacatgggcaccaaggcatgtccctgtctaggggactggggaaatatcccatagcagtgttctcacagtatggggctggccatgaataccccaggagtccaacctccctttgtccagctagaccatggtgtcctatgcctcaggcagggaatgtggtccagtcatcagtggctgggccgtctgccatacatggtgcaagccatggcgttttatgcagaaagtcctgctagcatttgattttctcagaatggagctgtgagcatggcaggcaaccactgtttcctggattcttcaccaagacaccccaagttcctggtctctccccgttatcctcatccctgaccctgtggttctcagagcctccaaacacactcaggctaagcactccatagacaggggaaatttggaaggaacatctagggagctcagaaaagccaatgtccctagccccaggcccacttcaaccttctctctgtcagtcctgcctgcccctggaggctggttacatgaagagtaaccccctgcttgtgtatagccccccagttttgtacaggtttagagacagttcccagcagtaggaacagctgccgaggtgggagagggcttctcccgatagccgggggacttcctctcccaggaacaacagggtggggtagagcaggcttgtcgttgctgagatagagagagggaagggaaacaacaaggaaagtgggggcactgggtccccaaggttcctggcacagcaagcagtgaagttggggcagcctcaggtcatgtagtgggggcaggtgacatctgctttgactgctcctaagagatatgtactcatctcctggattccaaactgcagcctgggacatgttttcttatataaacagcatcaaaagatgtgtgagttcccaggctagcccactgaaccctacctagtgggtgctcattgtcccccagagcccccagaagacaagccgtggctttgtgatgggcctggggccaggaggacctagggatatgttgtgaagagctgagaagactctggaaaaaaggggctctggagccaagcaggagcccgcccaggactcctcacgtgtccaagtcacctagggagagaaacagagcagcccaggttggtccctggaagagagcagcggaggaggggaaaggggagagcccctggggagagctttgaaagtcaagtgctgtttgctcagtgtgtttgcctttccgaggatgtgtttttttttccctccgttagtcagcagtgggagggggagagagacgggtggtagggtgcagggtacctcctggctgcaggcatatgctttgagtgcgtgttcatttacctcctctggacttcctgccttctgttaccagggatcaagacacaggtcattaggcgtgaggtaatggggcatctcttgttctgacccctggcgccagtcttggagtcctgacgctgcagaggagccccagagtcacatttcctgttggggcccatcctgctcatatgcggcaccatcagacttctgggcaggcaagattacctgtgactctgtctgatggtctcgccatcaatatcactgagagtagctgtgtatggagtcccgaactggtacaggataaaacagggggctgaaaagggaatgaatgggcacagtttctctggcatcaaaagtcacatccagaattgatatttcctgttgagtaaaaatagaaatataagttgctcagtggatgttgagtgagccctattcatgtgccccactctgtgccaagcaccaggaaggagggaagggaaaaatgataagatgttctccccgttctccaggagtttatgctccactaagaagtcagagctaacatgcacagaacagtgtggcagcgagagcagaaccgtgtggccagctccatgcttgccgcctagcaagcgtgattgcacttcatcctcataacaacttggtgaggtgtgttgctctgttgtcccattttacagcagagaggactgactctcagtgaattgaaatgtctcagtgaggtcttccacagcaaaaggcgaagcacagagaaggaagtccatgtgggctgggagttcacccagagattcatgtaggggcaatgtgggctgtaccttgcaagatggtgggatttcaatgaggagaagacaaagtgggaggaagctggagacaaggactgtggtctcttcctttagaagtcagttcaatctttttttccttgtggaagcagcataactctaggtggttcctctgtatctgaggacaagctttgtagaggtgacaaaggggtcctaggtcctatcaggcaagcactcgatatgctgccagttcattctgtccattgtgagatacccattccagagcgcttcctctgtgccaggctctacggaggttctggatgttaaagaggaagcaggcatggccctggccctcccagtcttgtgggagattgatcatgcccatgaatagtgaccatgtggtcagagccacagggtcaattccaaatgcccctgtttctcttttgtgttactcacctgactctgggtctttcgtttcttccattcattttttttaaacaaatatttcctgcccaccttctgtgtgccaggcctggggatgcagtgggagaagcctctgtcctcctcagtggaggcgctaactcagaacaggcagtggagaaaaacaacatgacctggagacctggtgccccttccttccccagcatctttgaaattcttttggttgttgttgttttgagatggagtctcactctgttgtcaggctggagtgcagtggcgcgatctcaactcactgcaacctctgcctcccaggttcaagtaattctccctgcctcagcctcccaagtagctgggattacaggtgctctctaccatgcccagtaatattttttgtatttttagtagagacagggtttcgccatgttggccagcctggtctcaaactcctgacctcaggtgatccacctgccttggcctcccaaaatgctgggattacaagcatgagccactgtgcctggcctgaaattcttcaatatctacctgcccttctgccagttggtgcagccacagtgggctgcttatgcatatcctggcctggcttggtggggagcatggctgagggagagccggggcacccatcaattaaggaggtaaagatcagtctgactgagatgcctcctgccacacttcctcagctgccagcaactgacaccattaacctgatttccttccccctctgttgactgcactgactattggactgaatgggaaacagccccgtgcacctcaaaatgcacttcccctcctgcagatgcatcttgcaattaggcccaaactgtgagcctgcatgctcctcccctggccctgcacaggcaacaaagctgaagttaatcagaggtacaaatggctggctatgcctctctgacacgtaacttctggaacatgtatcaatgctttggaaatgaaaagctcctggtattgcaatgccaggctggtgcccataagggccagaaaacattccttgggcaaagccagggggagtgggtgatctgatcccagctcaggtttgttgatttgttgttttgtttgtttcgttttgtatggggcaagggttgagggtatgaaaaacttacactatcatttactaccgtagtccccagaacccagcacaccagcacaaggcctggaacagggataccttttttgaatgaataagtctttttttttttttttttttttttttttgagacagagtttcactcttgttgcccaggctggagtgcagtggcgcgatctcggctcactgcaacctccgcctcctgggttcaagcgattctcctgcctcagcctctcgagtagctaggattacaggtatgcgccaccacgcctggctaatattttggtatttttagtagagatggggtttcaccatgttggccaggctggtctcaaactcctgacctcaggtgatccacccaccttggcctcccagagtgctgggattacaggcgtgagccactgtgcccagccttgaatggataagtcttaagggatatttttggaaaggatattctaaaaaatacccatgtctctacactattgcagaagggctttcagttttgatggcagcctttcaggccagcctacacgcaactaaacttttccataacagcatcacacttacacaagaagaaggttttataatccacttgccattatttaacatagttcttcctccttaactttcaagatctgagcactataatgttcttctttttgtttttgtttttttctaaatcaaattaaggtgagtcacctcaccttgggcctgagttggacagaaatctattcttggctatattccccacccctccaccaccttggaaccttatagaactttatgtggttcaggaaaatgagggcgaggcctcagatcttcaacccatgacagctgtatgcccagctccctgccttcctgtcttacccccagctagggcacaggactgactattgtgcccagagaggtgccagagcctgtaacaaccccagacttcccaggtccagccacatccaccccagagccccaaaagatgatcttcagagagacctttaaaacacaagtagctggtcacttccatccagaccagaacccaagatggctgtgctcttgctgagacatgttggttgtcattgcctccgagcccactttagccctcagctctgtaccagaaatgctgttcctttgggaatcacagccaaagaagagatggagcagttctggaataagaacacaagttcaaactgtcccatatctccccacatcactatctacagttggtctcttcccatggcgatgtccatctgccaccgtggcactggtattgctttgagtgcaggggtctctctttttggcatgttggccctgttactccctgggaactttgagtcttatttggaatgcgtgaagtccctgtgtccggggccagcactgatccacacagctaagtttgcactcatcttccctctcatgtatcatatctggaatggggtctgacacttgatgtgggacctaggaaaaggcctgaagattccccagctataccaatctggagtggttgtcccggttcttactgtactgtcctctgtagggctggcagccatgtgaagaacagaggttcccagcatcatcttcctacacattattacattcacccatctttctgtttctcacttttatctccagcctgggaaaagttctccttatttgtttaaatccttttgtgcttttagatccccttggagcagtagagtaccttgtagaccataagagtggaaaagggtctagttttctccttgtttctaaagatggggtggctgaaaaaactccccttttttgcctacagcttgcctctctgggcctagaagtggttattctgtctccatattggcctttgatttgtgctgagggtcagcttttggctccttcttcctgagacagtggaaacaatgccagctgtgtggcttctgccctgggggctgggggtgaggctttgggtgccactgcctgtgggttgctggcttaaaggacaattctgttcattggtgagagcccaggccattaacacctacgcagtgttattgaaagaagagaggcgggggtggaggggaattagtctatcccagctagagggagataaagagggctagttagttcttggagcagctgctttgaggagaaaatgtatagcttttgacacaacaggaagatccagaaaattatcattgaacatattaaaggttatttctttttcttgcaaaacacacacacacacacacacacacacacacacacgcgaacacacgcagctgatgattctactctcccagccccagccctgaaggggacccagaactccctgcacaaaggctgtccttcaaggggagggtgaaagaagtggaaaatcacattttcattctttagcgtctccatacaacagccagaactgggcagaagctaattatatcagaagcatactccatgttgctgcatcagctttgggatgttcatttttaaatttatttatagcttgtctcattcctcaaaggagttcagggagctacaaaaataaagacaataaaattgaaaaaaattaaattaaaaaaaccatgaccagggaaaatgtgcagtagaatgaagtgtcaattatcacgttttctgactgcaaaatctcccccacggctgatgcaccatcatttactacaacagcccctcttgttggacatttccagtttatttcgtttgggatggtttgttgctgttgctgtggttgtggttttgttttattgaattttgtgttagctgcagctaataccatcttgctgatggctttgcgctgctcttgaatgattactcaggataaatttcctggagacggattataggatcagaaggtctgaacttctgtgtggctctagctacaaagcaccagattgctttccaagagcgttgtagcaatttataatccaacactcagcctattttttggctgggagtcaagccccagaatgtgaaggaggggtcttggcctggagcaggggctgagggatgggtgcacaggacccctccttattggttatttatggggatgggccaggaggagcagaatagaggcccctgccctcccagttgctccttggagtgactgaccccataggggaggggcgaggctacctcacatttagaactatgtagttggtgatggtcaaggtcctaggtctgatgggcatcctcctccctctcctcctcagccagtaatggctgcactatgtcgtatgtcctagatctgggtcccttttgctgtgggaacaccaataatacttacgctgtttcctgccggaaacggtgcaggagggctgtggcatggtagtgggccctggaaaccatctagccttcatgaggaagggcagttaaagcacaggcatgtatgatgttggtattgattaaaagcctcacgggcagagaaattcgccatctgccagggccccagccatacgagggctccagccatacatcctccaggagactgggacctctccaattgcaggagccttgccttccccatcagattaggaattccccgaggatggggacaatgtccttcccacctgcttgagaactcctaaggggcatgtactctgtctccccattgtatctggaacttcctgggagcatagctcctgtctccgtcctcagactgggaatcccctaagggcagaggccatgtccttccacccacttgggattccctgaagttggggaccacatctctgatgtacaatgctttgtatgtactgactgctgcaggattcttggagtaaatgggcagtcaacttcttggactggtattgaccatctggacttcatcagagtgtccaagactttgccattcattagacaggggccatgtgcacaggcagagccctggcctctggcttctggctcctgactcctggtccctctgctttaatttggctaatggcagaaccagactcctttctgggctgccctggaaggggatccttgaatgaaagaggatagatgggaaggtggcagctgacatggttacctcttatgccatgggggggctgctctctctggaaatttaggcctggggtcagggcactgttgagcattttacaccctaggccagaggaggggtgacctgtggagcagggctaagctagtagcccatgaggtatgatgtgtaggcagcacctggggctcacagagcctgttacccatgttatctcctctgaccttggaaagagctggggtgtatgaacaagtatttataagtttacaaaaatcatatgaggaaactgaggcacggggaaggtaaatgacatgccctaggttacacagcttataagtagcagggattctgcccttctgtcacaccaagtcccactgtcttttcttcctggagtccctgtgactgatctaaaggccacatgtttaacagaataaggaggaggcctctgttgcagcaaaccagctaccccacccgcacacagactctaagggacatcctgctttaagctgtccttagttactaatacctcagtgagaatgagtttgaaattttctcaagagccatgggagactaggaagtctctaagcttcatagagagcctggcttggggggacacaggagccaaaggcagaggaagaagtggcagctttgtgcccccagaaacacgtgctcctgacctcacagttggccacagccagccaactctcccatccttctcccaccactttcccgtggggctaacttcaccctgtccacacggagtgacttaacagtttaagccccagagtcgggggccggggtacctgggacaagagtcctgagggaaatggggtgaggaactggaagtgccacagggctagagttctgcccctagcctactggagctgtgccccacaggctggccccactggactgcgctgcctccaagccatcctgggcatctccatgtgtagctgtcacgctcctcccactaaacgcctccctgtgcttcctctgcagttttcatgaacacggccatccccattgcagctgtcctcatagtaagtggatcctttctccatctcttgggggtagggtggagggggagggcgtctgcagtgacaggctgcccagatttggcctttctgcacaggggcctcagaagacaggctccacagccagactgaaaataggatcgaaagtttatagagggtgtggcccctccccaactccagccgaacaggggcctctgcctccaggcctggaagaccggaggcttagtatttagagaaattaaactttcttttaaaaaatagctatccaaatttttaatttttaaagtgaaacatgtgtattgtagaagtgatgggaaatccagaacagaaagctcaaagagaattaaaatcacccataatcccactggtaacatttttaatgtgtttctttccagtctttttttaaggcctatgatatgtcattttctacaaaaataggaatgtgctatgcatgcagttttgcaacctgctcttttaaatttaggaatatgccacacacaattctccatgccactgaatattatgatggtggctttctaaagcaattttgataaaagctgtgtgtgagctgagccatgggggtcaagcagcatgctcctacagaaaggcctgggcccctacgagcctgcagccccctcacccagcctcccatccccatcttctgtgatggctgcagttccttaaaaagatctgcttatttcccccggggccagtgtccctgagctgtgtagagttcacagcctgtcggatacacttgggaattcacttccaatgtgatgtattgagctggttcctggcctggctcctgggggaactgtgggtaacagaggccactgagccagccaggtggctggggcaaagcactgtgcagtttcgtaatcactctgtttacgttatcccgatgaggactggggagatgagcaccccgcctgctgtctgcagagggggccgtgctgacctaacccgagatctcctccctgcttattcccagccaagactgggcaggacagggagtcttggccaggacagggagggagcagcccctgctctccagcttgaagtcctgaacttgttggggacgtttccatgagatgactgtggggatgatgaaggtgtctccaactaaaagatcctcttaggagcctgctccctgacagccctctcatttcccttccagtgctgagcgtttccagtgtgggagggacccacaccctgggccaccctggcctcacttgtgcctctgtccacagactttcgtgggccacgtcagcttcttcaaagaggccgacttctcgccctccgtggcctttgcctccctctccctcttccatatcttggtcacaccgctgttcctgctgtccagtgtggtccgatctaccgtcaaagctctagtgaggtgaggggagggtccgggcgagggcactgggcaggcaggtcctgtgtcagcctcaaggcttgctcgagtgatggccaaaccacagctgtttggtcccggaacacacccccattgctgggccttgctgtagctggtcctggttggtcagagggacattggcctgtatggtttcccagctcgccatccctgagcaaggacttgcttacatacctcccaggagaggggactcactgtcactttcacgacaacttaaaaaaaaaaaaaaaccagtgttgagccaaatgtggaatcctcctaaattctacccactggtcctaacttcaccctccagagccaccaagaatgaggccatcccgtccccacgtggctgccccatggatatcagaaggcatccactgtgtctatctttcccaggccaagtatcccctaccctttccacagcccctgagccctcacagcctcagccagtgaaacagcttcccccaagcgctgggtcctgctctgattggcccacagctcttggaggctcccacttccaggctctagagcctcatggggactctgccactgtcccagaggcattgccctcttgggaatgaaagcctgaaggtagaaggctgaggctttggctgggaaatgccctgtctggagtgagaagatgtccttgggcctctgaagtagctctgcctccttgaaagcaagagcctgtcatgcctctatggagggctggcttgtccttacccatggccagagaaccagtcagtaacaaatgtcctctgtgtcttcagccttgaggaaggtgacacccctgtctcatgggaccctggcaggtactgggaagctggaaggaaggagtagctgttggaatgaagtagctgatagagagggtagcttgcagggggagactctagcatgggttcaaagatggaatggggcataactcagcaaaattatgctctaaggagtatctgaccaggcagtagctggttaaacagggattagctcccatttccacagtcggctgtgctgactcagtttcttgaccagggtgttgtggggtctgaagatcacccctcctcccaccacccactctccagccctatgattctgtgtagaaaccacagatttaagaacgctgcacctgcctgaaaactgttgcactgatcccaaagcgttcatattttcaaacactctggatcccactgtttccaggaatggaacaccagagtagcagaggccttttcagtgaggcagctcaggctctggctgaaggtgggcgcaggacactacctgaagcttcaccccaagagatgagggccagctccactcttcccagtcaccgcctgtgggggagggaggctggacagggcatgaaggcagagcctggtggtctgcccctcccatctaggggtggcgcacagaaagggagactccaggccacagctcacttacaccccagaataaccttgccttgagggtgggatggcttgtctgccccaggcctgttggacatttagcaaaagagaagaaaggggaatacaaacaatcctgagcttcccagaaagctttcacacctccaggatgggagagaatgaactagaagagtgaagcttccagtgcttcctcaggtccacagggaaatctggacaggggagagggtaggaatagccgcctcccccgtgagtaatgacacctcctccagcaggctgttatggggatccgattacataatgctacaaaacagttaacacagtgtctggcatttagtgtatgctcacaaaatactagctattgattctttaccaatcctagtcctaactaaccttaaccctgaccaatccaacaccaaccatccttcagtctaataacccagactaactaacttcaacattaaccctaaaactaaccaatctcacctccaatccagaccccagcctattccagctgactggtcaaccctagcaaaccctggtaacaccaattacctgcccccatgcccactggtctgcccccttcagtgtgggctttgtgggactatacttcaggcctgagatcctgctcagagctctctatcaggctgcgccctctcccctcccctctgcccctggcaggggtgaggggtgtctctgtgcttcccgagcagcgtgcaaaagctaagcgagttcctgtccagtgcagagatccgtgaggagcagtgtgccccccatgagcccacacctcagggcccagccagcaagtaccaggcggtggtgagtgcccggcctccccttgctactcccagcatggtcctctaaggcccaaaacttgggcctgctgtgtcggacttctgccttttttcccaggaagaggggctcccttccctacacagctcccagcccagtgggtcctcacctccaaaccacccccagcccctcagggttgtgaaccgcaagcgtccagcccgggaggattgtcggggcctcaccggcccactgcagagcctggtccccagtgcagatggcgatgctgacaactgctgtgtccaggtgagtcctgctgccccatgcctggccacccagcaccaactcccagagggagctcagcacctggaaagccagaaagctgcatgcttagtcctctgcagaggtcaccctgcctgcctgtacggtccataggagtccagaaaccagggaccaccaagtggggggacccccagccttaggcaagggtcagcatgagaaggccagtctcccactcccctgctctggaagtgatccaggggctggaatcagtgtcttttggctttcatggaggaggggaagccagagactattcactgggaactggctgcctttctgttctctcctgggcggtgggacacgcctaatgaagatcatgggaggctacttcacgtggaccccagatggaatccccacactgtccaacatcaccattcgtatcccccgaggtatggcccagtccacccctccagcatgcccctccccatgtcccactgaataacatagagataaaaagacaaagctgcatttattgagcacctactctctgctcattcttggtgtatgccctgggtatattatagaaggggaaggctacattctagaggcttccgtgtgctgggtgggagtgaagcactaaggacagggtaaaattgccagccttaatgtcaaaccatccattgcagacagtataggtaatgcacaaaaagatcagaagtgggtagccaaggaacgcaagtggaagtgatggggtttctgagaatggacaaaggccctgaggccatgaggcaggaggattttctggcagaggcagccatgagcaaagtatggaggtgggttggaggtgggacccaggatggtgtttcttgggaccacaaggagcctgggctcatactaggagcatgggaaaggagaagcgagtgcttaggaagggtggcggggcaggaaatcagagagggggaaggacctggggagccagaggaggatgttgatttccagaaggaaaggattaaagagggagaggacttgctggggattctaggtaggaagaaagaaaacaggggccccagggttgggtgcatctgtctgtctgtctttctgggtaatggttgttcagactcccccggccccactcacatctgccaccctccctccctgcaggccagctgactatgatcgtggggcaggtgggctgcggcaagtcctcgctccttctagccgcactgggggagatgcagaaggtctcaggggctgtcttctggagcaggtaatacatgtatcctcagggcccagtggaggggaaatctccttttaaccatcctcctcagttgaggatgcacacacatttattggagggcccactctgtgttcagtgaggactcaataaatgctgctaatggatattctcatcatcatcactagtacgtattcacctcttactatgcgcaggttctttgctaagtcctttgcatgcattatttcatttaatttttatgataactaacaaggtccatactgttctcaattctcatttatagaggaaggttaaactatttgtcctaattcacacagctaataagtggcagagctggaattgaaactcagttctgtcagactctgaatcccatggttactcagatgcacggcagtaatttcccagtgtgggaaattgcaacaccaacattggtttccagcttggtcctgagctgcactgacctacacaccataagtgggtgttctgaagatccagatgtaaccaataaatgttggtttctgggcaaagatcactgtcttaattaaagagccagaaccccaggctcagtcaatcacgaatctgttatttatacccacctacttccaagaagcacttgaaactagttgatgaaagattcatgtaaaaatcaaaaccacaatgagataccatctcacacccgttagaatggtgatcgttaaaaagtcaggaaacaacaaatgctggagaggatgtggagaaataggaacgcttttacactgttggtgggagtgtaaattagttcaaccattgtggaagacagtgcggtgattcctcaaggatctagaaccagaaataccatttgacccagcaattccattactgggtatatacccaaaggattataaatcattctactataaagacacatgcagacgtatgtttattgcagcactattcacaatagcaaagacttggaaacaacccaaatgcccatcaatgatagactggataaagaaaatgtggcacatatacaccatggaatactatgcagacataaaaaaggttgagttcgtgtcctttgcagggacatggatgaagctggaaactatcattctcagcaaactcacacaggaacagaaaagcaaataccacatgttctcactcataagtgggagttgaacaatgagaacacatggacacagggaggggaacatcacacactggggcctgtctgggggtggggggcaaggggagggatagcattaggagaaatacttaatgtagatgaagggttgatgggtgcagcaaaccaccatggcatgtgtatacctatgtaacaaacctgcacgttctgcacgtatatcccagaacttgaagtataataaaaaaagatgcatgtaaaataaaaccctttaaaaaggtaagaaaataggaactgagaaatgaagagggtaaaaagatgttcagcaacctgggcagaggacaactacagccatcaacataaaacctggctctgtgccctctggtagccaagggaaaaagggatctctgggctttggagtattcatttaggaataaaagttgcagccaatcagcagaagggcaagctttccctaccaatcatttctaggggaaaattattgaaggtgtcaggtttttcataagcatgagtacagaactgagcagggagaaagactttgggcccaatgtctgaatatcaacatgcacccccgtttcctgcatttccaagatgtccctgaatggtgtatccaaaagatggcaaatttccctcctcagtggggtcgtgggctagcagatgagccccttgggtttcccatcacctcccatcagggactgtgatgtctttgggggcagaggggtctttgcctccattcgccattttatttgggagatttttcaacatagcctgactgggaaggcccaggtattcggtttgagatcatattgccttattccgactgcctctccagcctttggagggaggagcccttttctgctgtccaactgcatgcctgcagcaagaagacaagagtccccagtgcactgtgagctgaagaaagtaaccaatatttattgggtacctcctatgggccatgccctttgctaagtgcattgtcaacatgatctcatcaagcctcctactaagtttaggaggggagtgttgttaccccatttcacagaagcagaaactcaggctcagagaagttgggtgacttactagtcagtgtgtggagcagagactctgcccatgttctttccctcaaacctggtcactgctggggcccccagggcctagtcctaagggttattgtccaagccccatgtagtggtcaggctggatctgggctctcctccaaggcagggcttttccagaaggattgcagggctcagacactggagctgcccctgccttgacctgctcagcatggatgtcaaaacccactctgaacctggtccctttgccctgctttcttctcctcccccaccctcatgccctcatgtggcatcgtgcctgcctcaggagctctccttgtcctatgtagatgaagcaggcatgattggcaggggtctgctctgccctgcctcagtccccacctcttctccaagctgtgccaaccctccgggtctgactgctgcccctctctcttaggaaacctctgccccagcccagggaacacaaggagcctctccaaggcagaggaccctaagcacttcttttttttattattttttattttattttaggttctgagatacatgtgcagagtgtgcaggtttgttacatagctatacatgtgccatggtgctttgctgcacctatcaacctgtcatctttttaagccccacatgtattaggtatttgtcctaatgctctccctcctcttgcctcccaccccccgacaggctcggtatgtgatgttcccctccctgtgtccacgtgttctcattgttcaactcccacttatagtgagcacatgtggtggttggttttctgttcctgcctaagcacttattataggccaggcactgtgcaggcacctcatcatctcagtcagtctgcaccgaactctgtgcagtagatattattatatcctcatttatcagattaggaaactgaggtgaagcaagttgtccaaggccacccagctgttaaatggcagaagtgggatttgcacctaggtgctcaagtgcattggtttgccaccatgtgctcaaagagaaggggcacaagagcctcatgaagaaggcatagctagcctgacagtccaaaggccagcagccgctgtggccatgactcacacacacctgcctcctcccagaactgccacgtgggtcctcacagctctgtccttatcaacacttactctcctttacaggtagcctaggccccagctcccagctctgttcgaggctcgcagaggggcggtagtgaaggggtctcatttctccaggatcctctttgctctctcgcccggtcctggtccagcttccctttcaagcatagtgaagtgcatttgttagcttgcagccaaccctgggaaatcatgagaatttgttcccaagtcaactcattctccagcgtccacagtgacgtattcactcacccagttgagcgcctagtgtatactagaccctgtgacagcaacaggagtgcaaaggtgactaagacgtggcccctgctttttttttttttttttttttttgagacggagtctcgccctgttgcccaggctggagtgcagtggtgcgatctcagctcctcacaagctctgcctcctaggttcaagcgattctcctgcttcagcctcccaagtagctgggactacaggtgtacaccaccatgccggctaattttttgtatttttagtagagacggggtttcactatgttggccagggtaatctcgaactcctgacctcatgatccgcccgcctcagcctcccaaagtgctgggattacaggcatgagccaccacccctggccggccccgcttttaagagaggggagagaagacctgggccttagaagagctcagaggaaccacaattgactctgcagtcaaggagaggaggctcactgcggatgtggtatttgagccttgaaggatgagtgtggtttcatcaagtagaaaaggcagggatgggaaagggaggtggtccaggcaggggtgatggtgtgggcaaagccttgctgatattaaagaacatagttctgtgcacctggaacactggatgcatggggtgcattatgaaagatgggactgaagaagtgaacttggcttagatcccatgtagtaggtctgagaagtaagatttaacccaaaggttgcaaaagaaccatgcttgtgataaaggatgatggattggggaaacagagaaaaagacagacagactgtaggaagggaggtattagcaaataatcataacacagtgtgaggtgtgcattaatattcactcattccaagtattgatcaagaagagaggtaggtactgggttaggaaacagcttgggcaaatgcatggggaaatgagagatgtcaagatgcattctaatggcagcctcttgaagatcttaagttgtttttggttcactcatttcgcaaatgaattcatttagcaaaagcactatggatacagtgcttacctctaggaagtaagttttagcccaaatgctgcagaaggatcatgcttatgacaaaggatgatggactggggagagagaaaaagaaaagacagacagactccaggaaggaaggtcagtctgcagctccttatagtggctaggagaaggagtctaggcagatacgactcaattagcttcatctgctgtttgtctctcaaaatctagacatgtgcactgctctggctggcccacctatcctgggcattgagttaagtgtgggggctgtgtgttgagagtccccctccattactggcaggaactccacacctcagacattgagccccaggtctgcagggagaagacgtgcttgcaaagtgagctaaaagcaaaacagcctctgacctggcaagcattcccaagtctgcacgcctgcagccagaggagagggtgatgccaggctgctgctcagatgcttttcagccatacccaggccaagacctggtgaccaggcagccagaaggagttccaggaggcacaaggcaggaagttgggggattaggaggtgtagaatggagaatgctctggggagatgggtgctttgttggtgcaactattcgtttattcctccagtgaccacgtgagcagtatggctgcacacacaggctctgcagccaagctgcctgggttcacatttggtctctgtgctttggaaaatttcataagctttctctaccagtttcccttattacccatgagattgatgtgaggattaacctagcatgtagtaaatatcctataaatattattattcaatagtgtacttctttgccaggaacaaaattcacctgttcctctttaaatgtcctccagtctgtctcctgggaaagattcttgtgagctccctggggacagggaccatattttgtttgtctcactgtatccgtagtgctttttgctaaacgaattcacttgctaaatgaatgaaccaggaacaacttaagaccttcaagaggctgccattataatgcatcttgacatctctctcctttccacatgcctttgtccgagctgtttcctaacccagtatttcactacccctcttctccatcaatatttggaatgagcaaataccgttagtgcatacctcacatggtattataattatttgctaatgcgtctgtctcctccatgactctgagctccttgagggattattccatgttgtaccccaggtgccccatgcagatgtgtattttgtgcactgttctgtgtaggctacaaaggaaaaggcctagcacctgcccttggggagctcacccacccaggatggacagaggtgtgcagacagagctgcagggtgggcacaaagggtccatctgctgaagtcctgcagatgcagccccgagcttgtccctcacgtcagcagcctggctcctggtctcagagagaactgtgtggttcccaagcattcactttaggaagaatcacttgcccctccctggctctctgcttcaaggaactgtgacaaccttgggatttgcaaactctctctttaatccttaagaggaaaatgttttggtaaaaagtcaagattagcagatacactcgggtgaaattctttccctggaaataaagaatagagccattaatatccacagtagagtgactttaaatgcccccggggggtcagcaggaaccagggccctgaggaaaggatcagcgtggggaagaggctcccacttccctgtgaggagctgcacatgcagtctcactggagctccctgctgcaatgctgttgcctgtggtggttggtgtggatgctgcctgccaagagccctgattccccaggaagagagaaaaaggcttctctcaggacggccctggtcgcatctgcctgtacaattcctggagcctttggggagctgaagtcaggggctcaagtgcccctgggtttcctggaggaggcaggtgtggtgagacagctgacagacaggagaagggatgctctgaggaagtgactgtccagccatgggaaccagatggcccctggctgtagtcctgatgctgccacttgctagctctgtgaccttgagcaggttacttcacctctctgagacagactcactgtctggacaatgagtaaaaccctacctttcctgtctcagagatttggcaatgggacccaatgacatcaattggaaaggatgctgtgggtgaaaggtaacctttcaggacagcgacaagcctgtctgggcaggatgaatgggctgtggagccctgtatatcctagctcactctttgaacctcagtttccacttcttccctttttatttattgccggggtcttaaatgagtgttgggggtatctgattctccctctgcctgtacttttggggccaagcactgagctgaaaagacaattcctcctagttctccaagcctacaacctgccccctaaccagctgtgagctgtaatacattctccagtgtcactgtgaggtttgtgccttcacccccattttatagatcaggaaacagaggctcctccaagtaaaggagcttgcctcagatttcacagccaatgagtggaaaagcctctgggattcaaatgtcagagcccatatttttcctacttctcgcacctgttatcatatgctgcctcttcctttaacctgcagttccctcccttcacctccaccgtctcaatccttcccactctttaaggttcagttcagctatgacttcttctatgaggctctactcattttctcagatttcttcctcctccaaatttcttgtaaaaattatgttttttctctgattctaaaagaatgcacattacattagaaaagatacacaagcatacagaagataaaaaccacctaatatcccatcacccagaagcttccagtttttctttatgcatttgcatatgcatttgtgtttacttttccccaaaagttctccgatactttgtcctacttttcttttgacccttataacttcctgacttcggtacctttctgatttgccctaccagagtgtgagcccctggaaggcagcctctgcaccctgattcaggttgccacacatatgccagctcctagtgggctggagggaaggacatgcggttggggaactggaagactcatgctttcagctgtgtgcttcctccctagagtgcaggcagaggaggaatcgaatcccctcagcactcttgtaaagaccacagcaatgagtgagagatggtgcctgccagacataccattctttacttttcagcttaaaacagatacaaagtttggggaggctcactggaggaggcttggggctacactggaaagagaagaacttggattcacaccccagcttcccctcttcccagctctgtcacatttgcaaactctgagtctcagtatcctcatgtgtaaaatggggatagggtttatagggttgtaaggatgagatgatgagttgtttgcaaacaacttctcacagtgcacagtgaaggtcagcaatgagagccagccccgccctttcttctttccaaatgattaatatatctgttaccagcctccattcattatatagctctgtcatgtgctaagcaccatgggggctgaaaaagatgttcttcctgccttaaaattccactggggatgaacaaattacacgggagctgatcagagaggaaggcagtccattatgagggctaattgagcagtgcagaccatgttgcaaactgagttagggcctggagagcttactgtgtgctggggtcctcaggaatgccacagatgcatcaataaccacctctgctactctggaagtagtcacatcaggaagactccagagataagcttatctgggctgtggccacagagctggaatttgtaagctttaggtttctatgtctcatgttaccagcttgtctataaattgtaaattacagccatctgatggttagggaatatgaagtttggttaagagaatgaaatgagaccacgaagattagagaacaggaaaagaggggactggggactacatacccatcagaatcttcattcagtcctgaccctcagcaggagggggatttcatcaggctcatttccatccttgatttcgtccatcctggttctcctgacaaggggcatttatcagagttatggcatgggaaatcacaggggagtaatgtaccatggcatttaagagtatgaacgttggagtcggagctattttctccgctacttactagctgtgtgactttgggcaagttacttagcctttctctgagcctcactttctttatctgtaaagtgagggcgatcagaataaacctccttcatatggttattttgagctttataaagagacaatactggctgagcacggtggctcactgccagtaatcccagcactttaggaggccaaagctggaggatcgcttgagcccaggagttggagaccagcctgggcaacatagggaatgagactcctgtctctacaaaaaatatacaaaaattagtcaggcatggtggtacgtgcctgtaatcccatctactcaggaggctaaggcaggaggatcgcttgagcccaggaggtggaggttgcagtgagccaagatcacgccattgtactccagcctgggcaacaggagtgaaaccctgtctgagagagagagagagagagaaaatactactatggtgcttataaaagttcaataaattttagctgttgttagtattattaaagtaagatctgtatgaaaataaagcagattttttcccccaaatgttcatgtcagaagtatatatttcattggcaaggggctgcttctggaaggttgagaggtatcctgggggaggggatagagcactggcaaaattggcatcacaattcaagtcacctcactcagtgttttttaagttatcaaaatccacagtatgaaaagcatttgacattacagtccactatatttatgcatttataaacaagagaaaaaatcacgaaaaatacagtaccacgtgcagtacacactgattccatctattctttttttttctttttcctcaaatgcacttgccgcctacttattccagacccaatgattgggtccctatccacagtttggaaaacactataagaaatgattgtgtcctctcactttccctctctgggatttagttttccaactataaaatgctcctgatgcccagccagcctcaccgctgctccgagtcaatgccaggaacgctgatttagcacatgctatttggagggtacccatccaggtgctgtgggagggacagagattgagaagagtgctttctgaccccacagaggccatttggaaaccctgggaatgggtgggagggttggaggtggggattgcttctcccctaagactcagcgtgatggaaaggcaatggggtgggaactaactggtgttggtctgtcccatttgtgtcccagcagccttcctgacagcgagataggagaggaccccaggtacagccttgggactgggtcagaagtgggtctcaacaaagggaaggggtagggtgggggtggaggacttgtgggtgggtaatgctgagtatggattcagggatgtgcagcctacatattttcagagacatggggctaaggcctgcattctcaatgagggcaaaatttggttcttggggacagaaaacacttagacattgcaatgctttgtggctgtccaaagtaccaaacagatgccagtatatctgtggtgctgaaatttcatggtgaatggagtcagaaaatagactagcgattgccagggtctggtgggagagagagggaagggactgccaatgtgtatgggatttgttttggggaagataaaaatgttttggaattagatagtggagatagttgcacaacctggtgaacgtacttttagtttcagaggttttctaaacctctgatttttttttaagtgacaggaaagacagaaaaaagtatatctaaaaaggctctaggggtgatcatggaaaagaaagttaagaaatatgactgtaaggaaaggagatgggtgtccctcaggccaggcagaaaattcagtcttgttgctttatgttcatgtgcaaatctaaaaaatccaagtgatatagattaatgaggctctgagtccctcaaaaccttccctccccttacctctccaaaaaacacttgagataccctagaggtggtatgaagtcaggatgggaaggttggctcagctttgcaaataagtttaagcctctggcctttgctctccaacaccaaagaggcttcactttggtatattttctctgccctttctccctccttgtccccaactgtcagtatgtgatgacaggctcagcctctgtaatggtagtgatcatatttcttgagccaaaaatcagacctcatggcatgtgacaagtttgcatatgtggatgagaacagagtggcagaatatttgacacgggagcagcttgggcagtccagggcacatggcactgcacctgacatccctggcagatcccccacattccgtggttgtcttctgatggggccatatggggctgcagatcatgcctggagccctcgcagctccagggctgcgggttcccagccccagagtgcaggtgctggtgtcagcctgcctggcctggcctggctctgtccagagcactccttgccccagctgtttgtgcagctgtatcagcctcagacctcagcctattcattccaacctgaatgcagaggctgggtctggaggagccacattgcgggcttcatactcctgatctgacaagttttccccccagagcctgcaccaatggcacctctccccattctccctcttaactgggtcctccagggccctcctcacacacccacgtggtcaggcagcagaggcttccccaagatgggcacaccccactctccacacctctctatgcagcatttgtggctacagactgggtccaggggattgtaaaggcatgctcatgttgggttggagggagctcaggatcttcctggaggatatggttcactcccatgagagctcagtatgcctttcctcccctgctgcagcccagagcgggagacagcgaccgacttggatatcaggtactgcgtcctgggaacattgccccccagggtcaactccctccagggtgctctcaggcccaagggagccacatcaccctgctgggcagcccccagaccccagccccagtgttgggggaggccagggagggcccctgtgctccaccaggtggctcgggagctgctgctgtttctgtgcatccatttactcccttcacataagatcatttttatctgggatctctttttcttttttcttcaaaaaccacatcactcaaaatgtggcttccttggctctgcttttaaaaaaaaaaaaaaaagttcttccatttggagaattacctgctgacttcaaagtccagtggcttgagggctacccaaagagggaggaagccagaagttgagtgttcccttggtttggtcacacttttgggctcctccctgactaaggaacaacagactgcagggctggggcaggctgggtgtagggcagggaggggatgaggtcctgctgccccagtcagttgagacccagacctctcaaacctgcctgggggaaggcaaggccaccagaggccacactaagcagatttctaccaactgcacctccccatccccttgcctccatctgagccatcagcttgacaactgcctctgagaacaagcccctgagaatgccttccgcaccccctactcccgccctgctttttccaggaagagaggccccgtggcctatgcttcgcagaaaccatggctgctaaatgccactgtggaggagaacatcatctttgagagtcccttcaacaaacaacggtaaaagcctgtcggagggaggcaggatgtggaggggaggaactgtctctggccagcctgccccagttccgggcccctccatcgatcacccacacccagccatctcactccccaggtgcttacctgcactccagcctctccatatggtgcacctggagaggggccaggtgtgcctgagcattggggcaatccagctcccataggggagagggcaggaatggagggaagggagagagccccgctgccttttctctagctggtgggagggctagctagctctctctgtgagtctccattcgcctggctcctgcactattttccctccaatgataatagttagggctagcatcgactgcgctcttactacataccaggcacagtgccgagctctttgtacacggaatttcctctcatgcttacaacaacctcagtaggtagatattattgttattcccactctacagatgaagaaccaagtttcagaaaggtcccaaggccacccagccagtaagtgaccaagatgggtctcaaatccaaagctgcctaacacctaagtacatgtttgtcaccaacatactctgatgcctccatgaactctggctggcacctgcccaggctaagggctggctggggaagtatgagaggaacaggctgggcaaatatttgaccagccatcatcattactgcctaaaccaaccagcagtggttttccctgcagtgccccaagcacgggttccggctgcagcttttcccactgcacagagatcatgagcgccctttcatcacttactctgcatatttgttcccaaccaattccatccttctagtatttaacctgcccaaacgctgtgtgaagtgctgacctcagctcttttcaagctcacacggtgtttgcttgcacccaagcgggaggcctattaaagccattgctcaccctgggcatagctacccagagactaatgaccctctgcaagtgctcgggccaactctgaccaggctgaccagctgcatcccctgcctctacccacgccaggtacaagatggtcattgaagcctgctctctgcagccagacatcgacatcctgccccatggagaccagacccagattggggaacgggttagtagcagcctctgaggggttttttcaaagccaggacccccaacctaccatgccctgagacactactcaggacaatgggtaactaggaaataggagacattgaaggctgaagagttgcctgcagtaaggtcaaacatgttgttcttgatgatgtcctttgacaggttttcagtcctgcttggagggcaaggtcagcttagtgccctcccaggctggggatcttcttcatttgcaccccaggtatacactgagagcccacacagcactgtgctcagcctggggttgtattgttcctgttcatcctccagatggggtcccctccacaagcttagacgaacaggattctcctgtgactgtcctccttttgtgtgattttaatccctgctgcctctgtctttgtttgtactggtcagatggtccctagcgcctacacaatgaatctttaaagacttggggctcatgctgccctcttctgaatgaattcagtaaacacgtgcaagttccttctctatgcaaggtgagaagcaggcaaagaagtggatagagccaggcctccatcccaaagagctcatagtccagtagggtacaggacagtgtctcctgaatggctgagggcatgatgtgttcctcctctttggtgacagggcatcaacctgtctggtggtcaacgccagcgaatcagtgtggcccgagccctctaccagcacgccaacgttgtcttcttggtgagtgcaagttcccttggggtcctggtctctggctgcctcccaggcctaactgcccacctccacctccccgcaaccccaccatcatccaacaatctccctctccaggagtaaatccctcctgccagagatattgccttatcatcctagtgatagggaaactgaggcaggcaaggatagcacaaatgacccattgcagacttcagatggagctctgcagtagccaatgaggagaggcaagctgtagttataggctgcctgtctgtgggacagcccaacccctcaacacttatgcagcccgactataagaatggctgataacagaatgtgtgctgccacttcccatcttatgcccagtgcagacattgctaattgttcacagcattatttcccatggaacttaactcatcctcagaatccttctcaacacagcactccaggtaaccactagccatcaaacatgagataaaactaggccaggcgcggtggctcacgcctgttattccagcactttgggaggccgaggcaggcggatcacgaggtcgggagatcgagaccatcctggccaacacggtgaaaccccgtctctactaaaaatacaaaaaattagctgggtgcggtggcgggcgcctgtagtcccagctactccggaggctgaggcaggagaatggcgtgaacccgggaggcggagcttgcagcgagccgagatcgcaccactgcactccagcctggggacaaaccgagactttgtctcaaaaaaaaaaaaaaaaaaaagaacgtattcgcaatccttacactacttcatgtcaagttctgttgtgtcaggtgccttgactgacactgaagaattctaagaaccagtccttggcctcaaagatttagaatctgattagggagacagagctcacccagttcaagaggcccagcccggttcaaatccaaactgtgcggcataaactatgagggggccttgtccagggagacaactgtgagggctggagtaatcagggagggcttcctggaggagagcctcaaagggagagtcaattaaacagaaggaaagagggaggccatttgcacagtgagttggaagaaggaagctcaagtctctgattccagctttattccctcccctctccctacaccacacgcacaagcactcctttactaaagacacttcacagtgggaagattcagtctccgttaccgtctgacacacacacagcgttttacaaagcatgggtgcattcgcgatctctcatgagatttaaacaaccctgctagagaaaagtgaagtggacattttatttcagtaaacgtttatgaagcgtctactctgtgccaggcactaaacgtttatgaagcgtctactctgtgccaggcacaggcacaagaagtctcagttcttgggagtgccataatcaggaatggacaaacaatgatcagatctggctttgcgccagtgtcacgggaatagggaggaaggaagggtaggcgtgggggtcaggacaggatgcaggaggaactggtgcttaggtgagcgaaggatgggtgggagttcacaaggcagacaaaaggcagagcagcactccaggcagaggaacagctcaggagaaggcccagacggcaggcttcctgggaacctggaatgcagagtgctgggaaagcacagatgaagcatgagtctagaagggaaagcgagaggttataaagcacctggaacaccagcccacagggtttgactttagagatgatggggagccgttgaaggtccaggagtcaggcagtgaagtgattagatctgtttgagagtgatatctgacaactgccccattttaaatgaggtaaccaaggcccagagaggttgggtgagttgtccaaagccacacagctaactagcttcagtccctagagcagagttgatagaactctaatgggttttatactcattgtcacccctccccaccatgcctttccctaccctctactctcttcctctcccttctgcccaggatgaccccttctcagctctggatatccatctgagtgaccacttaatgcaggccggcatccttgagctgctccgggacgacaagaggacagtggtcttagtgacccacaagctacagtacctgccccatgcagactgggtgagggggaacaagggggtcaggctatagggggcagggctggggaggctgtcaggcatcttggcaggaaccaatccgttgtcttggtagcaactgctgagggccacaaagcataagagaccagcactggatggctttatgcatgctgggcatttcagggagaccctgtacaggccaggggtttggtatcacctagacccacagacactccccatcctggcccgggccccccatggtacactcaaggctggcaccaagaagtctcaggaataatcaagtgctcacttctcaccttctgattcctgcccttttgatgacccatccccgcagtcatggggagtgcccatttggatggaaaagccctcttcccaccctatgaccttcccggggtggatggatgcaccaccccgggaatcatatgggaaatatggaaccaaacaatagcagtagtaatagaaacttcaggctgggcgcaggggctcacacctgtaatcccagcactttgggaggccaggacaagaggatcacttgagcccagaagtttaaggctgctgtgaaccatgatcatgccactgcactccactacagcctgggcgacagagccttgtctctgaaaatttgaaaaaggaaagaaagaaagaaagaaacttcaatattatcagtagagtccaatgttgtgaaacccctcattaactaaatttccatactcttcagtaggtagaaaataattactttttgattcattagaaagcacttaatttttaagatggagatcatgtaattttgaactctaggtcttgcctactcctatataaattctcctctaaacaacagccaaaattgaggccctctttgagcttcaggctggtgccaaatggctctgcttattttccccaaaataaatcttccttccatgtatgatgagaccccctccagtataaagaagacccaaagaaaatcacccaaagaaaaaaggcccaaagataagacccaaagacctaaagatttaaatatatatacagatacagaaggtttgtttctgagtttctgtagtgaccttggcaataccttgtagttcaggacaatcctgaggaacacagaagtgctggcttccttgaggaatcagtgatcaggactctcgagccccttgaaccccagcatagggcgggagggggtgagggcagcaggggtgggtgtctgaattaatgtcaggtctacgtgatggtgtcatcaagtgttccagataaaaagttttattgagccgggcgcggtggctaatgcctgtaatcccagcaccttgggaggccaaggcgggtggattgcttgagcccaggagttcgagaccagcttggggcaacatggtgaaaccctatctctataaaaaaaaaaaaaaaaattagccaggtatggtggcgtgcacctgtggtcccagctactcaggaggctgaggcaggaggatggcttgagccaggaagcagagattgcagtgagctgagatggtgccattgcaccccagcctaggcaacagagtgagaccctgtctcaaaaaaaaaaaaaaaaaaagatttattgattccaaagaggcatggccacacacacttagaccagcaggtgctttgctaagccctgatggaggctgccagacccgccgtcaagaggagctaagggtagtgtacaatgagcccacttagtgtatgacggccgctgccgtgggtggagtccttgtgagtaaccagccagcttgagcaggatgcactaatttgctctgcaaacccagccattgagaaatacgcctcagatgtaccgaactctaggtcctaggagtatgttggttggggtaggttatcaataccagcccacttgcagtggatgagctggtggccatttgtagtgaggaaagggatgtgtcaacctccatcttagactccacaattgagggatgtgaccaccattcctccccagccagcccccaaaccacgtttgttgctgcctttccagatcattgccatgaaggatggcaccatccagagggagggtaccctcaaggacttccagaggtctgaatgccagctctttgagcactggaagaccctcatgaaccgacaggaccaagagctggagaaggtgggtatatccagggatggccaagcagccacccctggatgcaaaggttctgctagaacctgaactcataaaggtcttcctgtccttagtgccccaggaagccccctaaagggcagatgtgggagctgggcatgaactggctcctaccagaggagagacagtacctgtgccaggtgcccagggcagaatcaggtgggcaccttcgccttatcctgaggtagtcagatactatttagttgcaaagtttcagaaaatcaactcaaactggcaaagaaaactaagcaaagaaaacaagagggaattaaggatttattgacccatgaaaccaaaaagtccaggtgtgtcatagctttaagtgtgctggatccaggtagtcagtgtaatcagaaatctgtttctcccatctcttgactctgctcccctcaaattggctcagctcccctcaaattggctccattctcatggtatcagtgagggccaccagcagtcttaggtttacattctcccagctcaacaactctgccagaaaaaaagtgcctctttccccatagttcagcaaaagtcccagggctgagtctcactggtccagtttggtcatgtgcccacccctgaacaaatcactgtggccagcggtgtggaatgtgaggattggcctgtcctgggtcacgtgccactttgggagccagatccacctgaatcacagagactaaaaacaggggaagagtggttccccacagggatatgggggtgctattatctgatgaaggggaaggactaaatcctggcaagatgaatgtgtgtctgtctgcccctccctcaggcagggacaaagtagaaatctgacattggtcatcaccagagtagttaccccttaacttccccttcccccaccaaccatatatcctgaagacattgcccaggccacatctgtcttttaggagactgtcacagagagaaaagccacagagccaccccagggcctatctcgtgccatgtcctcgagggatggccttctgcaggatgaggaagaggaggaaggtacaggcaatgggactgggagtgaaattatggcctgaggtctgatcagccacagagaggctaaggtttggggttctgggtgtggtgcagtagtgtgcctttgattaaatggcttccctctgtgtgcccccgttgtcccctcagtaagtggggataaaatgccctgattcaccctcagagggatggaaatgtgtagccacagagtgggttcttgcggcctgcagaggaggcagctgagagcgaggaggatgacaacctgtcgtccatgctgcaccagcgtgctgagatcccatggcgagcctgcgccaagtacctgtcctccgccggcatcctgctcctgtcgttgctggtcttctcacagctgctcaagcacatggtcctggtggccatcgactactggctggccaagtggaccgacagcgccctgaccctgacccctgcagccaggaactgctccctcagccaggtgtgactggcggcccatggcagaggttgggagtggggatgggggaagggctgagcccatgggcaccctggaactccaaatcactctctgcctgtgaaggagtgcaccctcgaccagactgtctatgccatggtgttcacggtgctctgcagcctgggcattgtgctgtgcctcgtcacgtctgtcactgtggagtggacagggctgaaggtggccaagagactgcaccgcagcctgctaaaccggatcatcctagcccccatgaggtacccgtctcccctggccaggctgggactgtgagcaagtcactgttctctgagccttagtcttcccatctataaaatggggatatacaacctgtcacaagcttgtgggggtgactcaaggagacagtgtgtgtaaaagtgccctccttgtgcaagaagcagggagaaactggcatttactcagccagatactgtgataggcattgtgtgtggttagctcatttaattgttaccatggccctttaaagtgagcgtctgcacatccaagtaaagattgttttctcctccctaagtgggtgtaatttgcccatccccacccatgagttcagctccctgccctcccctcactctctctccctcagccagcctcaggttttgacactgggggaacaggtagctgttctattaataatttcctgtaatgggatggataaaaatctcaaaggccacttgatgtcaaagaggtttaaagttgtccctgcccaattggttggccaacttggcttaaaaacacaacaggcaaacagattttctggccccttgtcgaggctagacctcacaatctaactgcactttttactttccagcctcatgagttttctgtggcccacagatatggcctccaagtttatttacttttactctctatttgccccagctctgtagttctgaaactccctggttggggttgggctgactctgggtcagccagccggcaggctgtccccagggccctgttcctcttggcaggttgtccctctggagaggactctgtgtcccaggaggacagctgctgagtcaggccgagccggcagctgagaaaggcggcagtcgtcagatgggcttgagaaactgaaaggctaacgaaaggccagcgcccctttgggcagctgcaggaattcacggggatacaggccagatgtctacaaattggcagaggatgccagacccatgaatgactccagagacacttacatgaaataattaactatctcattcagtaaacaggaagtaaatcaatggacaaatgagtaactcttcctctggctgcctcttaggttttttgagaccacgccccttgggagcatcctgaacagattttcatctgactgtaacaccatcgaccaggtacagaggaccgtgccacactatccccccttccagagacacctcggacccctgggggcttctcctgtctgaggctgggttccccagatcaggtgatcacagccctctgggaagaagccagtgtccccgatccgattataatgctgcttcagggctggggcctccctcgtgggagcctcacagtaaggctgagggaaaccagatccctttagcttccacctgagatcccactggctttctctagtaaagttccagcatattctgaaccaaggtggctgattgtatggagaatattcattttgattcagcctgtgttctttatttaccattgtaccagatggtgtgaaaacaaaatcttgattcctacctcagggagtttaccttgtagctggagagatgagatacgtgcctataataaagggagagcaaggccgggctcagtggctcactcctgtaaccccagcactttgggaggcggaggcaggcggatcacttgaggccaggtgttcaagaccagcctgatggccaacatgatgaaaccccttctctattaaaaatacaaaaattagccaggtgtggtggcaggtgcctgtaatcccaactacttgggaagctgaggcaggagaatcatttgaacccaaggggcagaggctgccgtgaaccgagattacgctgctgcactcaagtctgggcaacagtgagactcagtctcaaaaaaataaaggatcaaaaaataaagtgagagcaaaacatggcggccagtagcactctaaacacagtcaataccaaaattcacctcactctctccccctcgtctccctcagcacatcccatccacgctggagtgcctgagccgctccaccctgctctgtgtctcagccctggccgtcatctcctatgtcacacctgtgttcctcgtggccctcttgcccctggccatcgtgtgctacttcatccagaagtacttccgggtggcgtccaggtgatggcctcaggggtgaggggtgggaggtgctttgcaatgtgcagtttggtgtacttgctagactcatcgttatgagagtaatagggtcgtgttccctccaaaaaataaaaacaaaaaacagaaatgaaggaaatagaaatatccacatcttattccaccgccctaatataatagtctgccaacacacgcacacactgaggttgacatctgaattatttccttgggcgatatggtcaggactggaattgctaggtcatgataaatgcacattttatgcccttcattcattttgccaacatgcttcccaggagggttgcatcattctagtggtcaggctgattgctgatgcatgaaatcggcgggcacctgattcaagcagtgttatgataacacctcccagcccacgtgagtccagagtgtagctgtaagccttgacttgagggagcctctcacagccattctcatggatcacatttgccctcatgagctttggatccatgcacgcctctttcctcctcaaaattttctaagaatgttctctagggagttctttctgggagtgattctcccagattcatagaaactcatagattcaaaaaattgtaggaaaaaatttaaagaacgtctaggccagtgtttctcaaactgccaattacagcccatcagtgggtcatgaaatcaatatcatggatcacaaccagcatttttttaaaaatgaaaaaaacatcagactgtattcatagagtaaagcaagctttgcttcatgaaacctttgtgttggtcatggaggtgtgtgagtactgatttgtgagataaaatatatttctgactgcaggttgtggtcagaaaggttaagtacctttcccaagtgcacatagttggctagaaactagagttgagatacttattagcaataataaaatttagatgcattttggacacaattacctgccccaaaggatcaacatttgtataaatggctttttgcttggatgatccagaatggcccgacacccacacgaacaacatagctttttgacactcaaaaaattcaaagtgctgcacaagctgttctacaaagttcatttcttctgccagagaaacagcccagtctctgtggcacccagtctgaccctggagatggtttatcagggaaatcaacttcctgcatcccaaactggcctccctggcactgatgtgcttgtcgaggtgcagctttggggagcaggaggcaattctgttgccatggaaacctctggccttaccccgagacgaaacctatcatttcagcacatcactggccagggtctaaagagctccttgatggggtaagcggaagacggggttgaacgctttgagtttggtcttctgttcctttggccagctgtctcaaggttcagattgttcacctgtaaaatggaactagcactgcctgcccagccttagctcagctccaggctgtgcagcagaagtacagggacagatggcgacctggggttgacaatgcccaggacagcagtaattgtgccccacatcaggctgtgtctaagcattgtacataaacgatctcattcagtgctcacaaaagctcaatgggctggtggcattgtcttcccccttcacggggtaagaagctgaggcctagagaggtaaggccattcacccacacagcggtagcaggtggagctaggcttcaggcccaggccgagccctgagcctgccctcttaactgttccactctgttccccgccacagggacctgcagcagctggatgacaccacccagcttccacttctctcacactttgccgaaaccgtagaaggactcaccaccatccgggccttcaggtacgagtccacattcccccaaggtaggagtggaacaggggtggggccagggggcacaggccatgagatttgattctcaggactccacttgggaaggccaaggacacgttctctctcaagctgcctcaggtcccaaggcccaagggatatccaccagcagggacaggccaggtgggctcccactgaatgttctagagaggaaaattccagctctgtagacaagcccaggacctctgtgaggcagagcatgaaaagagacaaagctgggacaagtcttcatgtatcaacgctagaaagggccttaggtgcgggccaccctaagcccttcttttattaaggagcccctgtgtgccaaacactatgctgagtactgtacaggccaatcccactcattctgcactgcaaccctcggtgctgagaatggtcatttccattgcacagacaaggaaactgaggcacagagacgttctataacctctctgtgtaaggtgccacaaagcccagacttgaacctatttgttcatgcaacaaacatttactaagccccgactatgtgctaagccccatgccaggcactaaaaagatgagtcaaataagccgctgccctgcaggcgtttacagcccagactttgagcaggccaggataaatccacgtgacaagtattctgaaaaaagcggattcaagggctgtgggagcatagaagagagacagtccgggaaggtttttgtaccagaggtgtcatcagaactaggactcaaaggaggggcaggagttcaccaggctgaggaattcctgaaaacttcagtgcccctgccatcgtctcactaccctgagtggtgatgttggggtggacaggagcatctgaggttgcctggggaatgagggaagctgttgtttcccactccccaagagtctgtctgatctccagaggcatctctcttccagtcaggcaggccagagacccctgacacacaaagttgggctcttttctcatcttcatccagagagtgataataggttatttttagggtggcacagctgcacgaagtatgacagtaaccatgagacaccaagcactgtgtccaggagtaaccatagggcacaaggaccagccaagggccagagaggcttacatctcctccccccaacccctgaagtccagcttcagccctggagaggtatccaggcccctctgcccaccctggagcacctagggccagtggaaatccacctcttagggatcttgtctaagtaaagaagagcagagcaaagctctgccctggccttggcgctgctccctggacatcccttgcccctggacaagcctatgctgtgtcttccacaaagaagcttgctggggactggattatgactctagagtctcctcccagcctcctcttctcaagcctgaacttctcccgttccttcaacttccaggtccctcgacattactgagcctagcctttgctctaagttttggtgatttccctctctcaattggtgtctcagagggccctggggtagagagatggtgactcttctagagtgggccacagccccttgtgtgcagatcccagcttcctgtaaacagcctcagatcaggccaaacctgtggtcagccagagccactgctacccagtgaggtcttccacaccctactgacacggtgaatgatttttaaatttgaatgaaaggctttttaatcaaccccatacacatttaatgcattggctttaatccagcagcctgttgagagctattagcacttattgattgcccacttactgtatgccaggcaccgtgctaagtgttgtatgtgcattattacatttaatcctcacaaggaccacataacataggtacgaatcgccacattctccagatgcagaagcgagacccagagaggctgggtaatcaatccaaggtcacacagactgcgggggctggcgctgagcttggaacccaggtttgcctgaccttctgggctttcctaagagatcttattttttcccaaaagagtttcaagagtgcccagcactgggctcagtggcgggctcggaggttgttttcgttcatgtaggaactatcacttccccatttttttcataagaaaactgagtctcagtcctgatacacagccaggaagttgtgatgttcaggctccaacctgggtttacatggctccgaggctggggctcttttctagtcctcagacacactgtcgcacgcctgtggcagaagctcccatctcacacttgccgaccctcaactcacacagtcctgagacccacatacgctgagcgcctcacactcctataacacgcacatgccctgatgcacacacattttcaacacgcacttactctacccttcaggcatggtttcacactcactgcagacacgtcaccctcccacacgtctccaccctgggggtgtgcagtagcatgctctctcccacctcagaacctcccttcagtcccctcagacacatgccctctctccacgcagagacaatcaaagctgaactaacaccttccagggtgaaaagcaaatgcccagtaaggtacgtcttgggtgcctccgtgtcccctgagtttggtcctatcaaaccagcgatgatgaggcagcttttctttcgttccttcctccatcatcaaacaagtgctcctgcatctcctctgggccgggcctacgtcagcaaggtctgagggaagcggccaaggagagtgatgacggcagcccaggttgatcagagaaaggaggcaggtccatgcgcagtaactcagggaaaacatgatgaggacctaaggatgagaaagaagcctccagagttccctgtgcagagagattccatcaatttcagagggtcaggggagtgccatgcattcatccaacaaatatttattgatagtgccaggtgctggggtatattggtgaataaaacatcttcatggaatttgcagtctattgagggagatgattataaatagctagagaaatgcatgtacagcagatactgtggagcaaacaggttgcagacaataataggggaaacctactttatagtaaggtagtagccaggaagagcctctctgaggaggcagcatttaaggcaagccctgaaggttgagttgagccagccttatgaagagcaagggcaaaagccttccaggaaaagggaatagtgtgtgcaaaggccctggggtagggaagactttagtattgtcacagagcttttaaaaagctgagtggctgcagcatagtgtgtggggtgtttgtggcaggaattaggttggcaggagggggttcttcatcctataagcagtggaaggtcattaatattcttttttatttgtttttttttttttttttttttttttttttgaggcagagtctcactttgtcacccaggctggagtgcagtgaggtgatcttggctcactgcaacctccacctcccgggttcaagcaattatcctggcttcctcagcctcccaagtagctgggattacaggtgtgcaccaccatgcccagctactaatttttgtattattagtagagacagaattccaccatgttggccaggctggtcttgaactcttgacctcaggtgatccgcccgcctcagcctcccaaagtgctgggattacaggggtgagtcaccgcatccggccggagatcattaatattctaaacagtgggggagaggacacagtttgcgatttagatagattaagccagccactgtgtggagcatggactgtagggagacagcaggtagacgtattcaggaagctgatgcagtagtccaggtgagagtttgtggtgggcaggaagcaggatagagggggagggaggcaaggactcttttagagagagacataagaggacttgccaaggggctgaatgtgaatccaggtgattcctgggtgagaaactgggtaaagggaggtgccccttattataatgggaaagacctagagaaaatggatcttggggtgaaaacaagagtttggaggaggtggggattctggacaggtttgaataagcagaaaggagtggggtggacattccagagagggatagcttacatgaagtggccacggtggcatgtctggggactggaggggccctggagcctccctctgcaggtagggagactcctaggagctatgtggaccaacactgttcccttaggagcttctcatcctccctccaggtatgaggcccggttccagcagaagcttctcgaatacacagactccaacaacattgcttccctcttcctcacagctgccaacagatggctggaagtccgaatggcaagtgctattcccctctaccctggcctctgataggagggtggggccagagcaagagcacacaggtacctggggatgaaagagaggataggataccagatcgtgtggacaccaagccttcctgcttcccccagccctggtggtcctcctagtgtctagcctgtgctccttttccccatatcactgcctggaggcttgtgtatctgaggtgtgtgccagtggcaagaacagttgtggtgaatgtgtatctgcagtgggtcatatgacacccacattgtgtgtgtttgtgggccagctgaggcgtgcatgttaaagggtgtgcaggggctagggggtaggggagcatgagcttgtgggacatgttggctcctggggctccagccttcgcagcccttgtgtgtgtctggtgacgtgtgcatgagttgcagggctggagtggaggcctggctgagctgctctctgccccgaaaaggagtgaggtagaacaggggcctgtggctctaacccctgagcgcccaggtcagctcctctccctccccaggagtacatcggtgcatgtgtggtgctcatcgcagcggtgacctccatctccaactccctgcacagggagctctctgctggcctggtgggcctgggccttacctacgccctaatggtgagcggcagtgggctagggcagaggaggggtcagacaccagcactcccggagcaccttcgtcactggagacatgagacactcccaggccttaccccaatttcatttgcatctgatgccagagggacagtgcgggcaggaaggctgaccagcaggccccagggcccaggccccagacaggtggaggttggggagccacatgactgaccctccctgtgcctccagggagggctgctctgagcaggcagtggatggcagcaaaaggaatctggggccctggcccctctccagccttaagaagagccattctggtggctgaggacagaactaagcgaccatggagtgtgcgccactggcttgctccccacaggtctccaactacctcaactggatggtgaggaacctggcagacatggagctccagctgggggctgtgaagcgcatccatgggctcctgaaaaccgaggcagagagctacgaggggctcctgggtgagaggctcagggagaggggtggggaagagtccaaggaggagtgtgtctgggttgggggccacaagggagcctggggatggggtggcactttcggatactagctgtggcccatgcctggtggctgagcccagcccggcccccagcaccatcgctgatcccaaagaactggccagaccaagggaagatccagatccagaacctgagcgtgcgctacgacagctccctgaagccggtgctgaagcacgtcaatgccctcatcgcccctggacagaaggtcagagcacgggcccaacccaatgctgcaggacaggcgtgagcaggggatggggcatgcacggagctggatggcttcgcagtcacctcgtggccctccagggccgaggcctctcactattcagacatcgcagtctcctgccctgggcctgtgggggcccatctttcctctccttctattgccttcccccagtgctgccctcaggccttgtcttctcactcatccaccaaggagaccgacactctggactcccccagctcacacgggctttgtcagggcctccctctctgcgaatggtcaggggctttccctagggcactgccccgagcttcagggcagggacctgggggcagacagcgaggccacccttgtattgagggtgagcccctgcctatggccctggcccagctctcctctcgtttcccactctgtctctttgtctctgtctcactttgctgtggctgtccatgtcattctctgaccttgggatgtacctctgtccctgcctctctcatccttctatgtcactatctgtctccgtattgtaatttctgttggtacccaagtgccaggaagcaacgggatcagaggtggctccattgtagggcggggcacacagacacatccatgcataccactctcagctgcccctgtgtcctcctgccacacccatgcccatagagacacaccactgccccccagctctccttcagccaagtacccggcacacccagacccacaccaaggcccaggcaaatggacatccatgcctgcacttgcgtgccggtccctgtgtaagccctctctggacccactgcaggaaacaagcccaaacctgtggtgtccaaagagaaactagtcagaaaaccaggccaaaaagataccctgtgacctcccacacctgcacacacacccagagctagcatagaggctattcccagcagccccagagtcccagtggcggtgcctgcttctctctttccagatcgggatctgcggccgcaccggcagtgggaagtcctccttctctcttgccttcttccgcatggtggacacgttcgaaggtgagttgtaaggcgggcaccccacgtgtacccacagccaccagatgaggcctcagccctggcacgtggtcagacatgacaggaggcccagcagtcaccgccttcccctgcaccctcactgggacccatgcagggcacatcatcattgatggcattgacatcgccaaactgccgctgcacaccctgcgctcacgcctctccatcatcctgcaggaccccgtcctcttcagcggcaccatccggtgagccccaccacccctcaggcccacccagccccaggccggctcagttccatcagatctggagcacaaagaggagggggttgggggagaccaggatcccagaggtgtttcctgctcatgcccttctccatcccatcaggcccaggcagcctctggaaggggatcccccacccatgggtctaagatgctgtcccccacccactgccaccacctcggtgcttctcccagccagacctccaactcagtctgctctcgctcactgccctctttgccgcctggggatgcaggcaggaccctgctccctccctactggggctttctgtgccacttccagatttaacctggaccctgagaggaagtgctcagatagcacactgtgggaggccctggaaatcgcccagctgaagctggtggtgaaggcactgccaggaggcctcggtaactactcctggctatgcagctgggttggttgggcactcaaggaccctgtaaggatggcagacagaagcccgtgtctcaggtttgccccaagtttggagtctgaagcctggcaggaccatttagtcctacttctcactatacgggggcccagagaggtcaggtgtcttgccccaggtcacacaactggtcagttcagggtctggctcctcctgcagggtacagcgggtacagtcagggatccttgtgagacagagattgcgagtcccccatgccaagggggcatcttcagccctgccctgccccatccacctgcatgcccagttctgccttaggggaggagaagatggactgggcaatcatagacacgggtcactcatcaaggccaccggtgattggcaaagccttggtatatttgctgcagctcctggagcattgggggtggccaagccttggtttcaatgaatcaccctaccaaggccctacatacacactcagtgcacccctcagtgcacacgccccctcccagaactgcccagggccacagcagcacacacctccaggggtgcccttctcgttgcagtccttgcagacggcctccacattgttgtgtcaggtgcaccagccctgcacacgcctgtgctcttggacacacacccacctatttgcccccatgcacacattttccaacagccccccaagccatcccatctgctccactcacagcacaagattaactcagtcctacttcatctccccgggctgttttcagatgccatcatcacagaaggcggggagaatttcagccagggacagaggcagctgttctgcctggcccgggccttcgtgaggaagaccagcatcttcatcatggacgaggccacggcttccattgacatggccacggttggtcctgggcccctccatgggaccatggtcttggaaagggtttagtgggatgctagggagaaatttgcacgaagtagtcctgaggctcaagttgcctctaacatcaaatgctatgtgttgcagaaaatgaaaagagctggggggaccctgactctgtctagtcttagggaatgttacacacacacacgcacacacaaaaacactatgcaaacacacacataagctgcacacacagacccacacagacttcacactgtcacctatcacaacagcacacacacagccacaaccacaacctacatacacacacagagctgagctcccaacaggctgagtccagtccctgagtgccgggaacctgttcagtcctgtggggtgggggtgggactaggatcggggtcagatgggagctgagccacagacctgggctccacatcccccaagccaggccagaccccatccactgggcaggtgagccaacagctgttgcccccacttggcaggaaaacatcctccaaaaggtggtgatgacagccttcgcagaccgcactgtggtcaccatcgcggtaaggggcccattgatggggtgcagagggacacccagggacaggactggcctgttgtggccgtcatcagtgcacagcccctgggcttgcctggtcccagtaatcaagaaagaaccctgaagcaggcagttcagggcaaggggcctggagggcatgcagggagcctgggttgcaggatttggggtggggggttttgcccctgtgcttccctcagacctcccctctccttctccaggttccaaggcctgcccctgtcccaaggccttatatgttaggctggcgttacttctccataggaagtgggggaggggttgtggagggtctctgagccttgaagcctggaggtggggtagagttgggacttggagaggagagaagggtggtattagcagatggagagcttgtagtcacatccaccccaggaaagtgcagtccccacagtgacaggacattctggccacatgcctcatcctcctcctccaagccgcaggagggccaccctcagctgtggcccccaccgcgggtggtattcccaccatcctgacccgccccctcctgccctgcccagcatcgagtgcacaccatcctgagtgcagacctggtgatcgtcctgaagcggggtgcc

SEQ ID NO: 15339 - DNA, 103193 bp, Homo sapiens
ttcctgtctgccctccgcgggctccggctgccatggaggaggaagaggaggcgataggcttgctggacaaggttctggaggacgaagatgtgtttctcctggaggagtgcgagctgggaaccccgaccagccccggctcagggtcccccttcctggtggctgtgaaggtgggagcgtgacacgccctgggcgctggggggggccgggccggcgctgccgaaggtgcgcgggagaaatggctgatgcgggcgcagagcgcgcggccgggtggaagccctcggcggagggtcccggccccggcagctgttcccgggggagaggggcgggcctgcctccccgaccggtgtcctcggggcagtggtggccgccccctccaggccagcccagctcagggctccggcggctgtgccaggagtcacctggcgcgcctgtcagcccgagcctcgccgcctccctggagcgggtgggcaggaatcccccgtttccacggcaaccgcaagagaggggccaccctcttcccagccaggagacagggacttggtgtctccgagctgaggcaagagggtgtttgcaaagggcaagagccagaggtcactgagcttccttgaaggaaaagcactgggtcagctgaaggggggagggaacagctggcttggaggctgcagccaggtgggcaggtgcccttcccgaggcgggacaggcagggagcatctgctgggccctggcccacccgctctggggctgacggcgttctctgcagcagtgacccgtcctgtaggagaggttggctcccggtggaactggagggcagtggtggccagaatcccttgaggagcggggcggccccggaaccacgccggctctgtgagtctggcccggcacaccacagcggtcttcctttttctctcctggacacacctctcagagcttccacctcagccttttgctcagctgctctctggttctgtgtcgagaagggaggcccagtgaggatgcgtttcggggagtttgcagactgctaggcgaggctgcctaaccgagtgcccatcggcggggcctagaaggcatgtgcagccagcattgctggggacgggaggctgtccctgaacctctctgggcctccctgcccctcacagaagatggggatcacagtcctgccccacccactctacagtgtggctctgaggaggagccaatggaggtaaaaatagatgcagaaccacgggagatggctgatgtgtgagtatgggtggagcggtggctgcaggcctgggtggggagtggagctgtagggaggctggcagtggctggcaccccaccctgtcttctctgatctggtgctggcgtagggccgtgggggtaagtcacgtctccccgtgggctcagggaggcctctgcacttagggtctgaccagcctccccactaggaacagggtgggaaagtctgctcctgagccaggagtcaggctgggagtagcaatgctgggatgggaggtgtgtggccctcatgggcctcctctgggaagcccccagcacagatgtgggcccactcagaggctgcctcctggacctccccttctgctggaccccggcgtatgcctcagctaagcccgtatttcattctgctcagatgctcagaactctagacatttgcctccgcaattatatcccattctcctggaggaccaggaccatgtcatattcattgctgaacactgcacagtgcttggtgtggggctggtgcctgtgagagtctgcacaatgtgtgaggcccgctggggcccacgaagggtgcaccaggttcccagcctcgctccatctcagaggtgtcctgctgtgtacggcggtggcccacggatgccaagagagcctgagcacgtgtcacacctgaaaacgctgctcctcctgggtccccgtgagcaccgggatggtgtcttcccctctactttgctgccagcatgggggaaggagacctttctcgaatgccggggagttccaggctccctgctccatcctgaacacctctagaattcctccctcctctaccggcattggcctcagagggagaagacaagcaggtggccacagagcggtgggaagaaagctcctggattcattcaacaaacactctcaggttaggtgctcttcagagcaccctgcctggcactgtagagatgacaagaggaacaaggcgtgatcttccctcacaaggcgttcagagcaaggggcaggtacagggagtaggaatagagtacggaagtaggcagggtgggccagatgcggtggcacacgcctgtattcccagcactttgggaggctgaggtgggcggatcacctgaggtcaggagttcgagatcagcctgaccaatatagtgaaaccacatctctactaaaaatacaaaaattagccgggcgtagtggtgggcgtctgtaatcccagctactcaggaggctgaggcaggagaatcgcttgaacctgggaggcagaggttgcagcgagccaagatcatgccactgcattccagcctgggcgacagggtgagactcagtctcaaaaaaaaaaaaaaaaaaaagactgtgagaagagtactgataaaagggcaccaaattcaggggagaagggaccacttctagtggagttggggatggcctggatgcgtgcatgtgtgtgtgtgtgcaggccaagggtcatttctggatgatacactcctgtcctgggctgcagaggttcttggcacacccttccctggcagctagtaggaatccaaggcaattctctttgctattactttactttaggggtacttaccttaagcagcagttgcgttgtgagcatgtgcccaagtgccaggcccataaatcaatcctgtttccagtgtcatttccaagacgcttcatcttcctggggggcagaggtaaagttggctgcagttttctccaaagctatagctggagtttgctgcatatctcagcccagacttacctttgaagagttattgatctgtaaaactggtaatgcaaataaaatactgatagcagcgtcatgttgcatttgtaaaatggcttacacttgccaaaaatgtttcatgccattctatttaaagataggtagggttgtgacgggggcgttgtagaaggtgctattttaaggaacttatttgtcaggaataaaaacccttttgtaatgcagattaaccctttaggtatcattctgtgccatttttttttttcttttgagacagagtctcactctgtcacccaggctggagtgcgatggcacaatcatggctctctgtggcctccacctcccagactcaatcagtcctcccacctcagcctccccctcactacaggcacatgccaccacgttgggctaatttttatatttttgtagagacagggtttcaccatgttgcccatgctagtctgtaactcctgggctcaagcaatctgcccctcttggcctcccaaagtgctgggattacaggagtgagccactgagcccagcccaattctgtgccagtttttaatggatcatctgaaacatctctatttctgtttcacctgcccaggtctcttgtgcctgcacatcatgcctgtatcccccatttggatgtttttctaagtgcgggccccacgtggtgatttgagaaatgatcggtggcacctcgatctatattttgcattttaatggttaagtatatattttaatatatattagaaaaaatatgacctgtacatttttcttacgatttcaaatacgtgtagggtaagactgctttttacaagtcagttcttgggcgcagtggctcatgcctgtaatcccagcactttgggagactgggcgcggtggatcatgaggtcaggagttcaagaccagcctggccaacatggtgaaaccctgtctctactaaaaacacaaaaagtatctgggcgtggtggcgtgcacctgtaatcccaactactcaggaggctgaagcaggagaatcacttgaacccgggagatggaggttgcagtgagccaagatcctgccactgcactccagcctgggtgacacagtgagactctgtctcaaaaaaaaaaaaaaaaaaaaaaagttactgtaaagaacaatattgagtaaagaatagtgcaggtggtggtatgtgagtatggcaaaattttaagggtgggatatgaacaaccaaagtttcaaaacattgcctgtgccctatggtgcctgcctaagacctcagacagcaatagggagcccagaatacggggatccacccttcaggagagaggggccactggaatttggtctttgtcccccagcagttgacccgtcttctctgttctaaattctgccaaggaagcagctgaaagagacttcctcagcgcctagcgctgggagaggagagggtctctcgatgcctctacactgcctcagctgtcctgagactgagatgggccagttgtcctgaggttgatgcttggtgtgggtataagccccaggcacggccacccccacccccaggcccagtggcatctactctgagcagatcctgctgggtactcctggcagccagctgtggcccgtgaactgacttctaccgtctgtgaagcctcagaccctcgctgcatgccctatagccttgagtcgcagccagagagccagccctgcttgttgtcttggaggccagtgctactggagagattgtgtctttgcttggcctggaaccagatgtttggaggctttatttagcctctcaactctgtggaggaccaggcctgagctggccacgccttatctctagacattgttcctaccagagtgacctgacgtctttggtttggcggcttcaagctgccacactgtcagcctagcagattgtgcaggatgctgaggataaacgaacccaccaggactgcatttcacaagttctggctgggaggaagtgaggacaggcagcttcccggtgctggagacaggtaggcagcgtggcagaggctgtgggacctggaactctttagagaactcgctccggagcattctaggcacgtgggcacctctccttcaccttcgtattcccagtgcctggctcccggtgggaatgggtgagtgagtggtgagcctggtttttgatgagacaagagacgccctgcaaagactgaagaaacaatgtgaatttcctcatggctctaaactgggaattgtggagtctgaggaaagctggaaaagatgggagatggaacaggccttcctttggtggtgactgagcaacgggtctcctgttagccaagtgcaccgaggctaatttcccatccgtacgctctccaacgcctttgctccaatctcagccaaaactgcagcgtgaacggggcccagagcaggactcttggggctgactgttgcctcttgagggagggtcttcctgagttgtcttcccatcagaaccagcctttcaagagtggactatgaatggaagtcttgaggggaggatcttgcagaaatgggcgattacagggcttccagggtctatgctcgtgccaggggggatgaagcttgtttgtggctggggctgcaaatccctttcttccccccatcctagtccaaccagctctacagttacagctcacggtgtggcatttgctaaaccctcaggcaaaaccttggttggcagggaacaggagggagtgctagcccccagcacaggggatgagttcccatttgtcaaggctgggaagcagcaggaagacccctgagggtctgacctggaggggctggagctgggggctgttccaggctctgatcttgtcccccggggctacgtgtgctggaggctgtgcaggcctctggcagtcccgactctcggtgcctcaggaagatgataacacctgccaggttttgagactccggtgaattgaaccacaaagatagctaagctcagttcctggaatttgtgaagccgccaataagtaactattgcccttgcctgaagcgtggggtctgtcttgcttttctaatgctgctgaaacaaatcgccacaaacttaagggcttaaaaccacacaaatttattctcttatacagaaatctaaaaaggatctcggcccggctccatggctcacacctgtaatcccagcactttgggaggccgaggcgggcgcatcacctgaggtcaggagtttgagacgagcctggccaacatggtgaaaccccatctctactaaaaatacaaaaattagtgggtgtgatggtggacgcctgtaatcccaggtactcgggaggctgaggcaggagaatcgcttgaacctgggaggcagaggttgcagtgagctgagatcatgccattgcactccagccctgggcgacagagggagactttgtctcaataagtaaatacataaataaatagattaattaaaataaaaaggatctccagggctgcattgcttctggaagctctagggcaagcttttccagcctgcggccatacggcccaggactgctttgaatgtggcccgacacaaatttgtaaactcttaaaacattatatatttttcttttagttcatctgctgtcgttagtgttattgtattttatgtgtggcccaagacagtcgtcttcttccagtgtggctcaggggagccaaaagatcggaagcccctgctctaggggagtgagttcattttattgccatttccagcttccaaaggctctctgcattccttagctcgtggccccatcctctgtcttcaaacctaccagtgtagcatcttccaagcagtccctcaccactaccctgtctccccggccctctcactccccttctgtggccacgatgcctcagggaaagatggcattttaggcagcaggtaaagaacgaaccgaaagctagagacctttgaagatgaggaggctggttctcctgcgtgtgggggagactgagcgatgtcctggctgtgggaaagactggaagggtagggacgggcatccgggccactgcaggtggctcataaaggatatggtgggccccatgtcccagtctagggccgaatctttacttgttttttaaatgtctttccggcagggtgcggtggctcacacctgtaatcccagcactttgggaggccaaggcgggcggatcacgaggtcaggagatcgagaccatcctggctaacacggtgaaatcccggctctactaaaaatacaaaaagttagctgggcgtggtggcgggagcctgtagtcccagctactcgggaggctgaggcaggagaatggcgtgaacccgggaggcggagcttgcagtgagccgagatcgcgccactgcactctagcctgggcgacagagcgagactccgtctctaaaaaaaaaaaaaaaagaaaaaataaatgtctttcccactagagtctaagccacttgagaacaggggccactgtctgtttcccatggtatctatagggcctggtggacattcagtaaatatttattgaatgaataaataaatggacacatagcccagtggaatccccaagtactcgcgttttgcggtattcatactcggtccttggcaagcatcgggcaaggtggcactcttaggagttgaatccagctctggtgtgtgggacaggcaggaggagaggaagagagggaggaaaagtcggttcgagaacccaggtggaaaatagattgagggaagcaaaacgagatgttacaggaggaatatgggtgattgtcttttccttttatatttctgcatgttttgtatattttttataataatatctgacttttatcccctatgaaagtgtcgcttaaaataaaaggaaaggggaaaggggggccgggcgcggtggctcacgcctgtaatcccagcactttgggaggctgaggcggacggatcacctgaggtcaggagttctataccagcctggccaacatggtgaaaccccatctctactaaaaatacaaaaaaaattagtctggcataatggctgggcatggtggctcacacctgtaatcccagcactttgggaggctgaggtgggtggatcacctgaggtcaggagttctatatcagcctggccaacatggtgaaaccccatctctactaaaaatacaaaaattatctgggcatggtggcaggtgcctgtaatcccagctactcgggaggctgaggcaggggaatcactggaacccgggaggcggaggttgcagtgagccgagattgtgccactttacttcagcctaggtgacagagcgagacttcgtctcaaaaaaaaaataaaggtcgggggggaagggcagggaagcagaccgtccacgcagggttttggcctccttgctcatgagctgttggctgtgctttgcgtttgtgcaggtggaagcagggaaaggcctggagatgaggaagctggttctctcggggttcttggccagcgaagagatctacattaaccagctggaagccctgttgctggtgagtacagtccctgctctggggccttccggtccccccgcccgtgttgggtgatgtcatgctctgaagctgcttttggagttggagaggaaaggggaccgtacccgtccctccctgtggacagagtctgcagctggtctgcttctggctgggcatcgggcagcccgggtcattgccagaaagggcctgtgcctctcagctccagctctcaaaaggcaggagaagcacacccggcttagagatggcaaacacacctgtcacccacgaccctggcatagggcatcgtgaacccatcatggtgctctgcctgcctgggcgggggccgagcgccttctccacgctgtgctctgggcagtcattcccaatcaatccagttaagaagtctctgccgtcttgtgtccaagtccttctacctccctgggtgagggaaccgttagtgccatcctgaggccccgtgtcaggaaatatgaggtgggaggctgtgttctttttttttttttttttttttttaagacggagctttgctcttgtcacccaggctggagtgcagtggtgcgatctcggctcactgcaacctctgcctcccgggttcaagtgattctcctgcctcagcctcccgagtggctggaattgcacgtgcacgccaccagtcctggctaatttttgtatttagtagagacaggattttatcatgttggccaggctggtttccaactcctgacctcaggtgatctgcccgccttggcctcccaaagtgctgggattacaggcatgagccactgcgcccggcctgtctgtgttcttttgagaagcggcacagctctgaggcatcaggccaagctcagccctcggtaacatgcctcagttcccctcccagatggaggcatcgttgtgagagtctgattgggaggggaatatgaaaatgttttcggaagataaaagtactacacagatgtgaggtggttttgccttggaagaaagtgctccttagatgtgtctggatgttatgcagagtgatcgtggcgtgtcaatctttcttttgggtattttgcagcctgagacataaggtaattgtcagaaaagggagacgcagaagtgtggatctgtggaagctcattcttaacaagaattctaagatgcacatttaagtacttgccatgacgtgaggtgttgtcacacgtcaaccctgagatgctgtcagtgtcccaggggacttgacatttatgttacccaggaatgactgtgtaaatgtgcaggtgcaggccgggcgccgtggctcagtgcctgtaatcccagcactttgggagccccaggtgggcagatcacttgaggacaggagttcgagaccagcctggccaatgtggtgaaaccttgtctctgctagaaatgcaaaaaaaagccaggcgtggtggtgcatacctgtaatcccagttactcaggaggctgaggcatgagaattgcttgaatctgggggcgaaggtcgtagtgagctgagagtgcgccactgtactccagactggacgacggaagtgaaattcctcaaaaaaaaaggctgggtgcagtggctgacacctgtaatcccagcactttgggaggccgaggtgggtggatcacctgaggtcaggagttcgagaccagcctggccaacatggtgaagccccatctctactaaaaatacaaaaaattagctgggcgtggtggcgggcccctgtaatcccagctactcaggaggctgaggcaggagaatcgcttgaacccgggaggtggaggttgcagtgagccgagtttgcaccattgcactccagccggggcaacaagagtgaaactctgaatgtgcagctgttttgccacacgccaggctgagtacgtcccatctctccaggagtttatctgtgtgtacggagctgttttccaagtgaggggcagtgtggcaggtagctgagggtcctggtctggggccagagctagggcaagacttggccctgccattaagagcaggcgtattgcactgtttctcaaactgtgcctctcagcccatcagtgctttgggttgtgaaatcagtacagtgggttgtgaaaccagtacagtgggttgaaccagcatttttaaaccaatgaaaaaatgtcagcatgcatcatacacgggaaagataagtgagggaactttcggtttgttgtctgtctgtgtgcctgtatatatatgtaattgccgggcccatggtgtcttacacctgttgtgggtttgaaaactgctggctttggccgggcgccgtgtctcaagcctgtaatcccagcactttgggaggctgaggtgggcggatcacaaggtcaggagatccagaccatccttggccaacacggtgaaaccccgtctctactaaaaaagtacaaaaaaaattagccgggcgtggtggcgagcacctgtagtcccagccactcgggaggctgaggcaggagaatggcgtcaacctgggaggcggagcttgcagtgagcagagattgcgccactgcactccagcctgggcgacacagtgagactccatcacaaaaaaaaaaaaaaagaaaagaaaactgctggctttgggcaagccctacataaattccttgagcctccatttctggatctgaagatgagagggatgccattctttctctctctttccatggggttgagaagatcgggagatgctttcgggacctcatacagcgttgagttacttaagacactcaactgttagtggaagaaaggaggacaggcaaagagacaacccgtcagacattcgtgaaacacgtcttccaaaccgtgaattgctgtccaaaaaggaacatagttgtcattactaacagggtgtgtatttgaaaggagttcagacagaggatctagactgcctggccgtactggctccaggctttcagcaggtgaatgagctatcgtgcctcagtttttccatctgcaaactgggtatacaaatagtatgcttttcatggggtcgttgtgaggattaaaggaatttatacacagagttctttttttttttttttttttgagacggagtcttgctctgttgcccaggctggagtgcagtggcacaatctcggctcattataacctccgcctcctgggttcaagccattctcctgtgtcagcttcccaagtagctgagattacaggcacccaccaccacgcccagctaatttttgtatttttagtagagatgagatttcaccatgttggccaggctggtcttgaactcctgacctcaagtgatccgcccgcctcggcctcccaaagtgctgggattacagatgtgagccactgtgtccggcacataaagctcttagaacacagcctgagtgttcgttgacactgttaatttctctattgctgggagaggagacaggttagggcttcgtggtttctgccacaacacacccgttccctgaaggagggagtggcgcctgtccccatcagacacggagcccttagatcccacctgccacccacgagcctcttcctctgggccaagaccaagagcccctccctgctctgcctttctaacagctcatgccccaaaggcagaatctgtggggcaggggcccccttcctgatatgcctggcgcaggttccccccttccccagctgtctcctcccggggcaggttccccccttccccggctctctcctccccgggcaggttccccccttccccagctctctcccggggcaggtttccccccttccccagctgtctcctcctggggcaggttcccccattccccagctctctcctggggcaggtttccccccttccccagctctctcctcccggggcaggttcccccacttcccccagctctctccacccggggcaggttccccccttccccagctctctcctcccggggcaggttcccccccttccccagctctctcctcccggggcgggttccccaccttcccccagctctctcctcctgggcccctgcttggctctttcttgagcagagaccagagggagcaaaggaagaactcgctgggaggccaggtctgtggtaggagggctcaggaagaggagtaggaccctccacagccacagcctcagaagaaaacctcagagtgaaagaatcacacccttcctcctctcctccctgagctgggaacccctgcaccctccccacccctcagctaggaggaagctaaaccttctgctcttcggggtggcctcgcaaaggtgccagcttgaaggagaagaaattcgttccctccatgctcgctttcccactcctgaccccattcccaccgctctgccccagcctgtttgctttcatctgaacacttcctgatatgcaaagggctgggtgtgtgtacctaaaaccatgtgcacacacggggcagacgagcctccacacagaagcctccgtcctggcctctggggtgcttgtgggggtcatcttctggggccctcctgcttcctggtgggctctgattacaggaaaagcctgggagcctgggccgaagtagggggtgaaggaaaaaagatgaagccaactgcattgaaattctggatctccttgacactgggaactgagcttgggaactgtgtcttgctacgctggggccacagggtgaggccactccccagagcccctcccaccgctggccacgactggccctcctggggtggactcctggccacgctgcatcgcaggctctttatctataaaacaggtgaatgaggccttcctccctgggctccagtgacgagtgactcgggtggcatggcagcaagcatgccaggccttctggggcaggaggtggaggaagtgggtacatttctttcccttatttcgaaaggccggtcgctgggggacagagctgacaaacggctatgtgaagtcccactggcaagtgagaaccggcccaggcccgtcttcctgagaagcagctggtatgggagccagggttgaagtcactcacgggtcctctccgagaactcgagtggtgaaatggagagccggggcctgcccttgtccctgcagcaggactggggaggagggggtgcctgagtggtgtgctagcgctttggcagaatggctgtgccgtgccgaagctcagtgtgggtcaccttgcctttcagtccaccctcctgcccctgagcccatacgcaggacttcaccagagacaaataacggcctcgagggtcctggccagccaagggcacacacccagccctgtcccctccccgcgagtgaaatcaggagtaacagccaaggtccccatcgtgtcatgagaaccatctgatgccccaagcgcaggccccgtccttgtgactggctgtgggtgagcgtccatttcttccccttttgcagacggggtgggaagttgaggaggaagcataaccattgtgttttgtcttcgtgtgggtggcagatgagcgcgtcgcggcttctgagaaatcccgtctccttggccttcctgggactgctgaccttcctgcttcccttatttccccctcagtggggactgcgccaaggcggggacaagaattcttgggtatggggattctgtggcgactctgcgggctcctccgtggggtcctgcgttgaggtgaaaaggataaactcttacgacgatgtcaatcctgaagctagttccatgtccctcatggagggtggggagtccccaaagctttcagctcacccacctgggcttggggggacactcttcccttgctcctgcctcccggtgccttctgtttccctgtctggcatgcctctctacgcccccactcctccacctgctcagctctccaaggacctggtatgtgtgcctcctccatgcagccctccaggctactccagcacaaccttggaaccatgtggttggtgcttacagtcagtcgcatcgtccatagtcatttcatctgtgttggcccattttgcccaactggattataaaggtctcagccaggcatggtggctcaacacctgtcatcccagcacttcaagaggccgaggcacgtggatcacttgaagtcaggagtttgagaccagcctgaccaatatggtgaaaccccatatctacaaaaactacaaaaactagctgggcggggtggtggacacctgtaattccagctactcaggaggctgaggcaggagaatcgcttgaacctgggaggcggaggttgcagtgagccgagattgcactattgcactccagcctgggtgacagagtgagactctgtctcaaaaaaaaaaaaaaaaaattgcagtctgggaccatgatcgtgtacgcactgacgggaatgccagtaggtagcgcatggctgtattatcccagtttcacacatgaggctgctggtgacacgaagcccagggatgctgagtgatgtgcgcacagcagagctgcgactcaagcccaccctgcctggcctgcaccaggtggaaccccatgcgcttgcctagcaaggaccagacaccgaggggccgttggttctaggacggcgagggtcagaaggagaggcctgaccggacgcagaggggccgttggttctaggacggtgagggtcagaaggaggggcctgaccggacaccgaggggccattgattctagcacagcgagggtcagaaggagagtcctgactggacactgaggggccgttgtttctagcgcggcgagggtcagaaggagggtcctgctttgtcctgcatggattgttggatctgggctttttagagctcggaggatgaaggagccagaaggcagagcaccatctgggtgtctgagtagatgagacgacttcttccagtgaacatgggttctgtctccatcagagtgaggcgatatatctgagtagatgagacttcatcagaatgaggtgatgtgaggctggagtgaggctgggctgggagtttgccgtggttggctggagctggtggtcgtcgttcagagggagctggcgctggctttggtgttcccttcagtgcagcattttcagcagtggagtcacccattctctgctagaatgcttctcttgtcggaaagctcactacttaatcctatgggggacagctctagtgagcccgaatctgaccccataacttttccccactgttcctgggtctgcagagcaacgtagattaagtctaagcctcgtttttgtttttggagacagagtctggctctgtcacccaggctggagtgcagtggcgcaatcttggctcactgcaacctctgcctcctgagttcaagagattctcctgcctcagcctcctgagtagctgggattacaggtgtgcaccaccacgcccagctaatttttgtagttttagtagagacggggtttcaccatgttggtcagacttgtctcgaactcctggcctcaggtgatctacctgcctcggcctcccaaagtgctaggatgacaggtgtgagccaccgtgaccagccaagtctaagcctctttccacgtggccttcaggtaggtgaagaacatcaacagaatccgacatggctggccgggcgcggtggctcacgcccgtaatcccagcactttgggaggccgaggtgggtggatcacgaggtcaggagatcaagaccatcctggctaacacagtgaaaccccgtctctactaaaaatacaaaaaaaattagccaggcgtggtggcgggcgcctgtagtccctgttacttgggaggctgaggcaggagaatggcgtgaacccgggaggcggagccgagatcgcaccactgcactccagcctgggcgacagagcgagactccgtctccaaaaaaaaaagaattcgacgtggctgctctccctctggccaccctgcccttccctgccacaccttccctgtatggcaggttatcaggccctgtgtcctgcagggcctttgcagtacagcctggtcatctttggtttttttttttctgattattcatattcattcattgtaggtgatttataaaatgcagagaaccacactgaggaaatgcctgcacgtcccgttatcccacggtcccactgctaggctggaaggtgatggcatcagctcccggccagtgctgggggttggtctgtgttatctgccacctcaccgtctacactggcaggccctggagcatcttggtatagacaggcaggcattgagaaagagtctgagactggagacccctgccatgcgcagtgggaaggaccatcacggtcgcttagcaatgtctgccacgggggtgggctgcagtgggggacacgtgaacgcccatgcctctccctgtgccaagtgacgggaacttggaacatcagtgaggccaagactggtcttgagtaacttcgggtccctaccttctgagtcctagaaccacattctgtttcttggaaggaaacagctataggcttgagttccctgtcaaccctcccttccactgaagtgtgacaaggagcttatgactcggggcacaggctatcgtggaagaaagacgcggatcctgttaacccagtacaggctgctgctgagctcagctgcgtggtaggggagtgagcccaggcaccacccctcgggcctggcacagctgccaggccaggttcctgctgtcgagtgtgcggcttgttggggcctgtggcagtggctccttgatacaaagctcgtttcagtgccctgcctttggcagccttgtctgggcaggacttgggcagcgggaagggctaacgatcggccccggggcctgccgacactctggtttgtttacccccgacctctgctctttcttcctctgtttctcccagcccatgaaacccctgaaggccaccgccaccacctcccagcccgtgctcaccatccagcagatcgagaccatcttctacaagatccaggacatctatgagatccacaaggagttctatgacaacctgtgccccaaggtgcaacagtgggacagccaggtcaccatgggccacctcttccagaagctggtgagtctgccagggatggagggtcctcacgcagggcctcagtggagcccatagtgttgcaggagcctcaggagaggaccgggcagccctctcggactccttgaaggcctgagacctctccgagtccgggaggaaggcctgggcctgtgtgttatggggtgcctggggccggggccttgactctaggcctcccctggtgcagccctgggagcttctggggtggtggagacaggctgtgtggataggtccttccaggggtggtggagatgggctgtgtggatgggcacttctgtgggagcaccatctctctcccggagggtgctccttctccctcccggagggtgctccgtctttcccggacggtgctccctctctctcccggagggtgctctgaggaaccagccctggaatgaaggcttcttgctgggcttcagtctcctgtccctcagtgaacagaggggcacatgccgggttaggggcatgaggactgctcccctgagacctcgggtctgtaaaaggaagcagttgggcacactggccgatgatcctctcctgaggtcccaagagcaggaagcactgaagcccagccctgctcaccactgcagggtcgggagcggcaggagtgggtgggttaacatgcagacctcgtgttgggaaacgttcacagaagtcttctggttccctgtgcttctgtgacaccctctcccccagctctgccccatctctggctgtgtcccctggaggacccccaggtcagactcatggagctccctccccacctctgctacgtaacgtctgaccgcccagcaggcaagagggagactgggagtccaggccgcggttcttctctgggtgtgagtggccagaggaccttctcctccttcctgccctgttctctgggtgtgagaggctggaggcctcctcccctcccctgccgtgttctggctgaatggacagggctctgcctttctcacgctggagaagactctccctctcctgcctggacactcctaggacctctagctgagtgtgttcagagctgagctccctgcctccggcgtcacctgctccgcttcctgtctttacctcaccgagtgcttcagactctttctggctgcaccccctcccccacctgtcctgtggactccactttttggccgttgctcacagccgccttttcctcttcttggccacccatggccctcacctggacagctgcgtatcctcctgtgtggctcctgcctccaggcccactcacctcccacccccacctctccttagaggggagagagtcactgaaacctcgacggccccttcagcggatccccacggccctcggatgaaggtcaggctccgaggaatggctcgagagaccctttgcacactgacccgtgtccagccccagccttggcagcttcctccccgcacctctgtgctcctgacactggactttctgttctcagttcccagggcaggcactttcttaactcttggtacttgaggccccgtgtgcctgaaacgtccttccccctctcgtctggcctcccctggtcagttcccagcttagaagggacctcctccaagaaggctttccaagtcgccaaatgcaggccttgtgccagtcctcgtagtgagcactagtaactgcctgactcccccaaaccacaagttccaggaggacggactgcatttcctttttttgttgagacggagtctcactcctgtcgcccaggctggagtgcagtggcgtgatctcggctcactgcaacctcctcctcgcgggttcaagtgattctcctgcctcagcatcccgagtagctgggattacaggcgcccaccatcacacccggctaatttttgtatttttagtagagacggggtttcgccatgtcggccaggctggtctcgaactcctgacctcaggtgatccgcccgcctcggcctcccgaagtgctgggattacaggcgtgagccaccgcgcccggcctgcatttccttcttcttagactcccagaaccagcccagtggtcactgcttgaatgagtgaatgcaccgtgaccttgaccactgggcctcgggagaactcggaagggcatggagggagacgttgcagggcctgagatttctgtcctgagagtcctgtttctccagcacagcttctagagccgtgtcacaaagtgggcttgaatcccagcgctgccagattaaacctgcaactgggcaacttacccaaccgctctgaatcagcttcctcatctgtaaaaaacaggatagtaacagtatttacctcattgggtgattttgaggagttaatatctgaaaactgcatggggctgagtgtggtggctgacgcctgtaatcccagcactttgggaggctgaggctggaagatcacttgaggcttagagttcaagaccagcctgggcaacatagcaagaccctatctctacaaagaaatagaataggcctgactgagcgtggtggctcacgcctgtaatcccagcactttgggaggccggggtgggtggatcgtgaggtcaggagttcgagaccagcctggcctacatggtggaaccccatctctactaaaaatacaaaaaaattagcagggtgtggtggaatgcacctgtagtcccagctactcagggggctgaggcgggagaatcgcttgaacctgggaggcagaggttgcagtgagccaaaaccacaccattgcactccagcctggatgacagactgagactctgtctcaaaaaaaaaaaaaaaaaaaaatggctgggcacagtggctcacgcttataatcccagcaacactttgggaggccaaggtgggcggatcacctgaggtcaggagttcaagaccagcttggccaacatggtgaaaccccgtttctactaaaaatacaaaaattagccgggcatgataacacgcacctgtgatcccagctactactcgggaggctgaggtgggagaatcgcttgaactcgggaggcagaggttgtagtgagccgagatcgtgccactccactccagcctgggcgacaagagcaagactctgtctcaaaaaaagaaatagaatacaataaagtaaaagaaaaagtgcttggaacagggcctggaacatcataaattaataagtactcaataactggtcattatcatcagtgccattattattattattattattattattattattattattattaaattgggaagaggcaccctggaaggtatccttccaagggaatgccacactctggttctagcatacccccccctgctccctccggttcagggatggtgaacacctgtcatcactgcctgctcacctgagctgagtggcctggggggcatcctctcctcatccctcaggagggtagaggagagcaaacctagggttgctggaaacgctgtcacagtttatctttgtcacttggacctggctgtccccggttctggtcttggctccacaggcctggccgtgaatctgctacccaccactttccctccccagcatcgtgaaccgatgcctgaggcccctggggctgcagatttgggagggcccggggggagccgggtcaggtctggcatccggaggtggtttattttcagccgaagactctgggtatttgattattcgttactgagagaagggaattagcgtctctgctgtttgttttatgagatcactccagtgccaggctgctgtttccaggcaacctgcacttcccagttaatgaacctgccaagccaggcctcgggccctaccgcctggggtgactgtggcagcggcagtccctgagattaccgtgaccctggacgcaggcctccgcacggctggctcctgcccctggctcctgggagggtggtgtgccaacccgggcctccaggctttctccttcttgtgggaaagggggcaagaggagccttttcctggaagaatatcggtgatctgactttggcttaggcagcgactgtctagtatgcctcgtgtagcgtgggcattgatgggccgggcctcagtactccctggaaaaggaaataaactccctcccgtccggccccgcccccttttaaggtcaggccccaccccctttaaaactcaggccccgccctcttttaaaagtccggccctgcccccttttaaagtcctgcccttctgcagctgagacctgaatgcctctggccttggcgtcacgccgggcgtccccactcgcgctcccctctggcttttccagatgccccccgctcccctgccccaccagcttcctcaaagggctctgcctctgtactgggaggctccaggctcagccgatgctgcggccagcctgcccccacccctacccccaccccagcctctctgggtccttggggagcatgaggatcctgcagaaagcagagtggtccggggtgggggtccacagcagcccacttcccccagcaccttggtgggaagcagaggcccctgaggaagccaggcagcagctgtatcccccttgctgctgtattgaaaaacatttaaaccagaaactccaaagaataacagcagaaccttctaatgaagaaaatacagcgtcacacatgaaggtggagtctcccctccctcctccctcttgaagcagctactggcatgaatttggtggatagccttccagactgcagtttgtgtgtttactacatatctgtatctattttgggttggcctgtactttaaaaaaaaaaaaaggtcttgctatgttgtccaggctggacttgaactcgggctcaagtgatcctcccacctcagtctcccaagtagcgagggctataggtgtgtgtaccacagctcccagctgcatgtactttaaaaatgtgtctaagccaggcgtggtggctcacgcccgtaatcccagcactttgggaggcggaggcgggtggatcacctgaggtcaggagttcaagaccagcctgaccaatatgacgaaaccctgtctctactaaaaatacaaaaactagccgggtgtggtggtgcgtgcctgtagtcccagttagtcaggaggctgaggcaggagaatcacttgaacccaggaggcggagtttgcagtgagccaagatcgtgccagtgcactccggcctggttgacagagcgagactccatctcaaaaaaaaaaaaaaaagtgtataagtatacacatatatcatattttacagttcaacccatgttcgttttggagcttgtcagcaatcgtattttacagttcaacccatgttcgttttggagcttgtcagcaatgctatgtgtaaatcgggtgcatccatgttcatggctgtgtgcgcggcttcccccgtttgtgagcatttgttaccagtccctccactatgaggaggaaaagtgagatggtgaacacccttgagtcccctggggcacacacataggccatttgctccagagcactgctgtctaatggaaatagcttatgagccacgtacatcatttcacattttctaatacccaccttttttttgtttttttgagacggggtcttgctcttgtcacccaggctggagtgcagtgatgcaatctgggctcactgcaacctccacctcctgggttcaagcgattctcctgccttgtcctcccaagtagctgggactacagatgcgtgccaccacgcccggataattttgtatctttagtggagacagggtttcaccattttggccaggctggtctcgaactgccaaccttaggtgatctgcccgcctcggcctcccaaagtgctgggattacagttgtgagccaccgcgcctggcccctaatacccacatttttaaaagtaaaaataggcaggtgaaattaattttgagaatatcttttatttattcccgcagatccaaatattatttgaacatgtaatcagtatttaaaaattaacgaggtaatttacattctcttttacatactaaggctttggaacccactgtgtattttacatgtccggcacgtctcagtttgaaccggccgtatctcaggtgcttggtagcctcaggtagctggtggcgactgcactgaacgatacggctctgcagtttgtatgtaaaagtggatttgctaagcaatcgatgggctgtgcctatccacactgttattagttcaactgaaaataggccatgcctattctcagctttattagttattaacaaattgctctccaaataattgtactaatttacacttccccgagtagtctaagagtttaaattggccgggcgcggtggctcacgcctgtaatcccagcactttgggaggccgaggcgggtggatcacgaggtcaggagatcgacaccatcctggctaacatggtgaaaccccgtctctactaaaaaaaaatacaaaaaattagcctggcgtggtggcgggcgcctgtagtcccaaccactcaggaggctgaggcaggagaatggcgcgaacctgggaggtggagcttgtagtgagccgagatggcatcactgcattccagcctgggtgacagagcgagactccatctcaaaaaaaaaaaaaaaaaaaagttttaattggccgggcgcagtggctcacacctgtaatcccagcactttgggaggccgaggcaggtggatcacctgaggttgggagtttgagaccagcctgaccaatatggagaaacgccgtctctactaaaaatacaagattagccaggcgtggtggcgggcgcctgtaacgccagctactcgggaggctgaggcaggagaatcccttgaatccgggaggttgcggtgagccgagatcgcaccactgtactgcagcctgggcaacaagagcgaaactccatctcaaaacaaaaacaaaaacagggagtttaaatttccccatatgcttgccagccgttgctgtcaattagacttttaaattttgacccttctgatgagtataaaatatctcgtgatggctttaatttgaatttctaccctttggtcccttaagaggaagtgcttatatacagcgcagcgaagcctttccataaatatttggggaattgacttatggagcctcggtttccccttttgcagaaaggggcgatggggtctgccctgcctctcagaagaggcgaggctctgtgtggttgtgactcaggttgtgactgtgtgagtgacaggcaaacgtgtagtgaggctggggctttggctccttggaggtagaggaggtggaagaggtgaggacggggcctcaaggccaagggaaatggaaagacagcatcttcatttgttgttttgttttctttttgagacggagtcttactctgtcacccaggctggagtgcagtgacacgatcttggttcactgcagcctccacctcttgggttcaagcgattctcctgcctcattctcctgagtacctgggattacaggcacgcgccaccatgcccagctaatttttgtatttttagtagagacggggtttcgccatgttggccaggctggtctggaactcctgacctcaggcctcccaaagtgctggggttacaggcgtgagccgccacgcccggccaagacagcacctttaaatgtcgttccccacgctgcacgtggggagggaggcctgagcaggccacacgtgccagctccccccagcacacacacccccctctctccctgctccggctaattccaggatgtgaaggaagtatgagacattaagggatttcaaaccctgggagaccttcaccgtgctgaggaaagctggatgctgtgaagagttgaatttctagcaggccaacaaaggccctagcctggtctccccaaccccagaccccctcattaaccttattggctgagctggtttccatggaaactgtccagttcaaagggacactgtaatatgttcatccctgcgtttccccaagttcccaacgagctgagtgagaggttttcagtgcaggggagctcccggtgctccgtgaagctttcatccattcattaatcctctcccctcccaccctcctctccctctgttccctgactcctccctgcaggccagccagctcggtgtgtacaaagcgtttgtcgataactataaagtcgctctggagacagctgagaagtgcagccagtccaacaaccagttccagaagatctcagaggtaggccgctccccacatagccaccctgagggacaaggagctttgggggctgctcagagcccttggtctcccctccctcgcttgccagtcggtgaagtggttactctaatgggtaacacttagcctgatatttgctttcttgcacctgacattttccctcttaatagaaaacgatctattttatttatttttttattattctctttcagattagagagaggaacaggggaggcaaaaaaaaaaaaaaaaaaaaaaaatccaaggcagtgttctcccacaccacactatggtgaccttgagcaagtcacgtcccccctcttggcttttatgtcctgtccggtagaatgaggggtttagaaatggccagataatccttttttttttttttttttttttgagacagagtcttgctctgtcgcccaggctggagtgcagtggcgcggtctcggctcactgcaacctctaccccctgggttcaagtgattctcctgcctcagcctcccaagtagctgggattacaggcgcacaccaccacgcctggctaaggtttgtatttttagtagagatgaggttttgccgtgttggccaggctggtctcgaactcgggtgatgtgcccgtctcagcctcccaaagtgctgacattacaggtgcgagccactgagtccagcttggccagctaatcctgaccttgcttgataagaatcactggggcattgtttaaaacacagatttcctggcaccttccccggagcttctgattcagaaggctttgcgtggggcccaagattctatatttgaacaagcttctgggtaatatttatgacagggaagtcttgaggaaatttggactataggtcgtcttttaaggttcttgccaactctaagactgccatcccataaacacaaaaagggtaagagccacttatgtggagaaggagccttagaatccctggccgggaacacgcgtgcttctgctcctgaggcccagccttcctggccaggaacacgcgtgcttctgctcctgaggcccagcctacctggccgggagcacacgtgcttctgctcctgaggcccagccttcctggctgggaacacgcgtgcttctgctcctgaggcccagccttcctcccgcactcctccacagggcagaggtgcagtcctatctgccatcaacatttctacctaagaggtggcatggagggacagttgcttaggatccttcaggacagagcccagttcatccctttgtccaaaaagacctcagtggcacccctgaagcactggcctgagaggaacagcccccagctcagggcaagagaacctccatcctagaaaaggggagaagcttctgcagttttgggagtcctgccgtaaaggcccctcttggccctttgtgttcccgtctcagctctaacgctagaagagttggggaaacgcagggtagttttcctgaaacttcaggggtgacggtcgatgcccacgtttagaatccaccgagaggcagcagagaagctgacagttggagatgaacatgtcaccttcattactgttaaaaaaatgcagcttggaaaatgtggatttggatctgtagccacagtgggcttgctgacacttcgcctctggaatgaaacgtacctatagaagccgggcgtggcggctcacacctgtcatcccagcactttgggaggccgaggcgggcggatcacctgaggtcaggagtttgagaccagcctggccaacgtggcgaaacgccgtctctactaaagatacaaaaattagccgggcgtggtggtgcacacttgtaatcccagctatttgggaggctgagacaggagaatctcttgaacccgggaggtggaggttgcagtgagctgcgatcacgccactgcactccagtctggtgacagagcgagaccctgtctggaaaaaaaaaagtatctattgagtcccttgcaggaataggaaaacacaggcccctctccacaatgaggacagagcccacgcctcttacccagtgtgcagagagaggatggctgaccatagtttcttctcccagacccatggagcagatgtgtcaccctctgcctgggaggacgaagtgcagggtggggaagtccctctccatggagtcaagtggctggagaggccaggtgcagtggctcacgcctgtaatcccagcactttgggaggccgaggcgggagattggcttgagcccaggagttcaagaccggcctgggaaacatggtgaaaccccgtctctattaaaaatacaaataaaaggggctggagaaatggtgctttccctgcggtttccagcccaacccaggaactacctggactcccctggtctgtgttcagatcagccctgccaaggccgcccaagatcccggggtcagacatggtgcagagagtgtggggtcttctcttggcctgggctgattgcctgttctctgtgcctaggcagaaacccccacacccaaccataagcccctcacagcctgcccaccctggagggcagagccaggcccctggctttctgccaggtggcttctcatcctgactcactcgatgacgtgcttgcttcctgctgaggctgccacttaattactgcaattaggctcctctctgcagcaggagtgatttcataccctagacttcactggagggggcgtgaggaaacattcccgaaatctgggagtccaggcaccagccagagacacaggctggggacgctgagtatcccccacccccccgccccccaaaatatacacacacccaagctccatctccaggagttttctctgtctagaaacagcttgagacagaagtaggaagttcctgctgtctgagcgcttcctcccctgcagaccaagcaggtggcatcacctcggcagctgaccttggcctcatcacctgggcagctgaccttggcctcatcacctgggcacctgaccctggcctcatcacctgggcacctgaccgtggcctcaccttgcctcctgccttccctcccacacccctctttgaggctccgtgtgctccgtctgccaagtggggatggtattacagctccagttgcaggctgcactgtcctgttagcaaaagctggggctggaacgtctctaaaggaggataaagaggcttggagcagatgagtcatcccgggggtctttccagtactcactacctgctgcctggcttgggatccaggaggggcattggctgttcctccctcgaagcttcctctcggacccccagcatgggcagtggtgggtggggagtgtcgggggtgctgggggctgagtaagtgctctctgatgggggtaggatgcagctcactgtcctggggagctcagcatctctgccgaaggtccaccacttccctgctggcgtgtgggacccttccttcctacctcatgggttcctcatgccctaaagattggctggagtacctggcgctggtcaactcaaaccctgtctgcccttggccgacgtgtagggttcctgagtcggggttcctgtaatcacagggctccctgccagcctctctcatctctgggacctggagtcccttccttcttgcccacgccccagccactggactccacgaggctccaggagttcacaggtgtggtgcaggggattggggtggcagaggcagcccatggccatggggctcctttgtctttctttttttttttttttttttttttttttttttttttttttgagacagagtctcgccctgttgcccaggctggagtgcaatggtgtgatcttggctcactgcaacctccgcctcccaggttcaagcgattctcctgccccagcctcccaagtagctgggattacaggcacctgacaccacacctggctaacttttgtatttttagtagagatggggtttcaccgtgttgaccaggctggtctcgaacttccgacctcaggtgatccgcccaccacggcctctcaaagtgctgggatgactggcgtgagccgccacacccggcctctgttctcatatgtacaccctgagtttcagaactccccttcttgccaggctcacagtgggggctgggagaggtgagggacagaacaggccatgactcctctcctccctttggcaggaactcaaagtgaaaggtcccaaggactccaaggacagccacacgtctgtcaccatggaaggtacctcggggagcgggctggattacaggcacctacctttgtctggctgtgcaggcaacaggctgcgtgaacgcggcgcccttccccttgtgtgtgcgtgtgtgtgagcgcgtgtgagcgtgagcgtgtgtgagcgcgtgtgagtgtgagctgagtgcgcgtgtgcgcgcacgcgaggactctagcctcgtgcccaggcagccagccagctacaaacgtgctcctctttaggatgccagcaggctgctggctccctccctccctacccctcctccccttccccttccctcctctcctcgccacgcgcctccctcccctcccccttgctggaagagcactccggagcggctgcccgatgctggagtccgtgcggcagcatcagcaaggtggctgagtggccgggctgctggtgggcgccggggagcctggagcgatggctgcacgctcccgccgcggggacagaggctgccatggagattctcctcattattcgcttctgctgtaactgcacctatggtaacccaggtgctcgctgtgggaggtggcggaccctcccacctctgggggccggctggagtgggcttagatgtggccggggaggttagagggccgcagggaaggagggtgggcgagcggctggacctgaattcccccttcgttttggcggcatccagcctagagttgaaacctgggggctgctcagagcagggccgcttgcaaatggaaggaccaggctggaggggtccaggtggccccgaggatcggtggggaattggtgggctagtgtgagagaacttcctggaggggctgttagggagagacggcgacgagctgtgcccgcagacgtagtagccctgaggccagggagagggtctgcgggggccaggcacagcgtggcgatgggtggcgatggtccggacggcggcgttgccagccgagagggtgccagcgcgagccagagggagaagttgggagtttctttgtttctggagagaggcgcggaggctgggcggcacggtattgtgtgctccgcgcacatgcagcagtaggcggaggacacggaggggctgtgggagcaggaaggagaggtttgtttccagccgtgagagacccccagccgaggtctgggccctcaactgtggaaggcaggtcggcagggccagcgggagaggggtgtggcaagctactctgtgaaggtcacacacacacacacacacacacacaccacctttcggtggaagggacccggaccatcctccttgcagctcccgcagctggctgggggctggggggaagtcccgggacaggtgcatgtcatcaacacgactgtcggtcgtaggaggatgaagccggcccaggtagggaggtgtccagaagcccgtggaccctgcctcaagaggcaagacgtgccaaggggtgccctgcctgcctgtggcagggagtggggtgggcacgtgtggctcccaggccggctgctctgggcctgagtctgtgggagcagcaggcggctggttttaggaccttcctcttccttcccaccaggtgtttcggctctgcacccttctcagtcactttgctttcctatctccctggtaacctggagctccttggagctccttgtcgaaggctgacttgagggggatggtggcttgccggaagagagatggcaggtttcctgggctccttcccaggggcggctgtgctggaggggctgtgtggggccagtgccccctgaccttctcaggaccctcttgatggaagcaagctctgaggcagcctctctcctgcggcccagcagggcggctgcaggaaccctgttctcacttgaaattggcctggtcagcgatcagaggagaaatggtctttttggtctggcctaggagttggtcaggtcttgactctgcctccctgaaaaggaaacgtacccttggcttcctctcccttccccaaaaggaagcttcgactcagtgaaacggacctgggacctggagttcacgttgcttcggtctccgtgatactgttgttgaagtcggcttcaaagtggggaatgaggagtgaaagggccagctcgtgaggagggggctcaccccatcctggtcactctttccaagaacgctcctgtggttcattgaggttttacaggtgctgcctttccctgaagaaggtgcagctcaaagcaaggagtgcgggtggatctacccagctcccaccacttgtagccacaagtctctggcctcagttgccttgtctgtaaaatggggctagtgagaattgcttcccgttttaatcacaggaaataatgagagcaaagcagttaactcagtacccttgggcacagagcgagtacccagcaaactagagagagaccagcttgctgcccaagtcagtgtcagtggagagggagagtgggtgaggccgggcaggaagcaggccagcctgcaggagcccagggacaggggaagggccagagcgagtgcctcaccctgagttctcaggggaccccagcgtgcaggggccgtggggagcacaaacttcagggccgctcttattcccccggttccctccgtatctgatgtggtcccagtgccgccaccccccccacccccaccccccccgtgcacctgccctcctggccgcccttccagggctcattccacagccttactcaggtggactctggaggtgaccacagacatgttaataacccctctgaaacccaacctgccatgtgttcagacctctgagcttagtcagaaacctcttcctcttgggacccaagagagggctgcggggagccgataatgcagtgtcagctttctgtggagccgccactccggagcccaccctggcaggtgtctgctgagcttgtgctttcttttgggtctctggggttctccagtgtgattttttccccctgaagatgggctgagccacaggtgggtgccttaaacagcctcagaaatggatcccacctgagctaggacctgggctgcaccctcagtgccgaggataccccaagactggcctcattccttcaagcttccatggcccatggggagggtctctggaaactgctagataagaaagggctacagatatgtcatatgaagtgtatttacgtaaaccagtggttggccgggtactcatgcctgtaatcccaacttttggcagactgaggcaggaggattgcttgaggccaggagttcgagaccagcttgtatttggcttgaggccaggagttcgagaccagcaacatagtgagaccttgtctctatatttatttttatttaaacgaagactcactgtgtcgcccaggctggagtgcaatggcgcaatctcagctcactgcaacctctgcctcctggattcaagagattcccctgcctcagcctcccaagtagttgggattataggcgcctgccaccacacctggctaatttttgtatttttagtagagatggggtttcaccatgttggccaggctgttcttgaactcctgacctcaaatgatccacccgcttcggcctcccaaagtgctgggattacaggcgtgagccaccctgcccggcccctcgtctctatatttttaaaaaaattaaaataaatacataaataaaacataaagcagtggttttcaaccattattatacattcaaatcagtaaagaagctttatagaaatgctgatggcccttgtggtcttgcagagatttgggttgagttgacggggctggggagcagcatctgtatcttttaaccgctcccccagtgattccgacaggcagccaagctcggactgcgggtaaggctggtggccctgctgaggctgcattttcttcacagccagcagattgctccctgaagtgtctgcttagccgcgcacggggtatttatatctcaggctttggagaactatcaggtttggggcccggctagggcgtgcgtgttcacgctgggacctgtcacaacctggtcttatgggacacccagtctgggatccttcttcccagatgaccaacctgcctctgtcactgcccctgcggcaggaggcccaaggtcatgaccccagggacagagcatccaggtgcaggactgaagctgagcctcctgttgggagggtgggcgcagccgcgtacaggaagggtgttgggaagtgttgatccaccagctgccacctccacctgtccctgctgaatcccagccatcctcacttggtgtccgggttgtggagggtgtggctcttgggggcctgggctggccttgcctgcgtcctcccagcctctttggggctctcatatgtgaggcctaacctgagttgcttcaggaaacctttgcccctcaggctgccacgtgtttgagagcacagccttttttctttttttttgagatggagttttgctcttgttacccaggctggagtgcagtggcatgatcttggctcgctacaacttccgcctcccgggttcaagtgatttccctgcctcagcctcccaaatagctgggattacaggcatgtgccaccacgcctggctaatttttgtatttttaatagagatggggtttcactggttggccaggctggcctcggggagcagagcctttctgtggagatcaggccagcctcctggcctccagcctccctgcctccagccttcctgtgctttgctatctggggtttgaggatgtggggaggggtctttcctctgagagatgaggccagtcctgtggatcacagtgaggcatgccaatcccagctggctgtgcctggccttcagctccaggagcctgagaatgataaggtctggagagctgcccttcctggaaacacagcatgtctccttcccccattctggggtcctgcatgtggcaggtgtgctagactctgcagggcatggctgggtggagctgtgtgattctggggttctgcgtgtggcaggtatgctggactctgcggggcgtggctgggtggagctgtgtgattctggggtcctgcatgtggcaggtgtgctagactctgcagggcatggctgggtggagctgtgtgattctggggttctgcgtgtggcaggtgtgctggactctacggggcgtggctgggtggagctgtgtgattctggggtcctgcgtgtggcaggtgtgctagactctgcggggcgtggctgggtggagctgtgtgattctggggtcctgcgtgtggcaggtgtgctggactcttcggggcgtggctgggtggagctgtgtgattctggggtcctgcgtgtggcaggtgtgctggactcttcggggcgtggctgggtggagctgtgtgattcagggctgggggtccaggagagcatctgccttgagccaggtgaggccaggacaggcctggggaggggggcggggcggctctcgatgaagccatgtctgatgggagaggaggcagggctgcggagggagcaggggctgccagggctgtgtgtcacctgtgtctgctgtttggtcggcccggggagtgagaacagaggtgggggctgccgtgggctcactctggtgtccctcgaggggtgttcacgtgggaagcatgcgggtggggggacgaagctggtctctggggtgttgggttgccctcgtccatcatcctcttcctccttctccctgtctcccccgacagctctgctctacaagcccattgaccgggtcactcggagcaccctagtcctacacgtgagtgtcaagcctccgaatggccagagagggcttaggagttcagtggaagactgagcctgggtgagagggtgctggagtcaccgagaacagtccacctggggaatcaggggttcctaggctccaaggatgcctgtctggcccgcggtatccatgccgccaggctagggcctgaatacagcttggctactaagcttgacgtggccaggtgctcccggggaggcaggcattcctgcttccccacccgctgcctcctggtctccagtgtccttggagcagctgcagggcagacacagggtttctctcccagctgctcggggggatgagcctccacctggtctccacactggggagagagtatgactgtggccaggagaagagggggcagccagggccctctcccctgctgtgctggctctgattttttttttttttttttttttttgaggcggagtctcactctgtcacccaggctggagtgcagtggtgcgatctcggctcactgcaacctctgcctcctgggttcaagcaattctcctgcctcagcctcccgagtagctgggactacaggcgcccgccaccacgcccagctaatttttatatttttactagagatggggtttcaccacgttgcccaggctggtctcgaacttctgacctcaagagatcccccgcctcggcctcccaaagtgctgggatttcaggcatgagccgccgtgcccggcctgactctgatttgtagttcagattttgcgggaattaggcaggtccctgagtgcccaccctttggatggggactgagcactccccggtggccacacatcaggccccagagccgctcccctcaactcaccgcctcacccttcccaggacctgctgaagcacacacctgtggaccaccccgactacccgctgctgcaggatgccctccgcatctcccagaacttcctgtccagcatcaacgaggacatcgacccccgccggactgcagtgacaacgcccaagggggaggtgagctcagagcccggcacggcccctcacccaggctgagaagtatcaggtccctcgtccccttctctcacacacgggcggcaggtccctcgtccccttctctcacacacgggcggcaggtccctcgtccccttctctcacacacgggcggcaggtccctcgtccccttctctcacacacgggcggcaggtccctcgtccccttctctcacacacgggcggcaggtccctcgtccccttctctcacacacgggcggcaccgggtgcctcctgcctctccaatcctgatcccccattcccagccaaggagaggttttcagcccttggtcaccctgatgacctgcagctttccaggccctaggctgagaagtttaagtccagtgtctcattaatcctcataataatctagggaggccgggcacggtggctcacacctgtaatcccagcactttgggaggctgaggcaggtggatcacttgagttagaagtttgagaccagcctggccaacatggtgaagccccgtctttactaaaaatacaaaaattagctgggcgtggtggcggatgcctgtagtgccagctactcaggaggctgaggcaggagaattgcttgaacccaggaggcggaggttacagtgagccgagatcgcaccactgcactccagcctgggtgacagagtgagactccatctcagaaataataataacaatccagtgagccagaagaacctgaggctggggagtctctccaggtccaccacgcagtctttcagccactggtgtcagagctggattcctcacctgggactgtctggaggcccacgccggggaagtggcctccgggtgcctcattcttgaatgcagacacctgcctctggccagtgtgatgccgtcagggtctcctaggaagcgaagggagcaggagcttggagctgcttcagctcggcctgcacacgcagtggcttgcggggagcccacagcaggaaaggctggcgttggaggtggtggaggccgtccaggttgccggaatgtccagtgggcacctgcatgtgggacagccgttccctgggggcccttcttgatgcaagggtggggacagcccagcaaggggagtaccaggaagcatgagagggacagttgccttcgtggattggcagccgggcccgggtgaaaggcttcctgtccaggggaggccattaggcggccgttacgagtgaggctgacagggtgtctgctcctgtggtctgtttacgagcccccagggtctcctggggagaaagtggtgagggacaggcctggacagtgtccactgggcagagagagccgattccgtgcggctcctggtgctgatgtgcagcgtctggggatcccgtcgtctgttttactctggggatatctgaaaaatctccagagggcttagcgtaccctccgttttcagtcatcctttttttgagactgaatctcattccatcgtccaggctggagtgcaatggcgtgacctcagctccactgcagcctccaccctctgggttcaagcaattctcctgcctcatcctcccaagtagctgagattacaggcaggcgtcaccatgtctggctagtttttgtatttttagtagagacggggtttcgccacgttggccaggctggtctcaaactcctgacctcaggtgatccacccgcctcagcctcccaaattgctgggatgacaggtgtgaaccactgcgcccggcctcggtcatcttaattgtatactttgaatacgctcacctacgtattacagcagatgtaggtcacaccgtgtatcatacaggaaaggctggcacagatggggacgaccccccggctctgagcgggggttggaaactctggaactcccacgtggagcagaaaccacccagagcccaggttagagttggctgcaggtcccctctgggcactgctgcagtcccaggctggagggcccaggtctcatccccagggggctggagaagccagggaggagtagcacagacaggcctgagtgggtctcgggtctcgggtctcggttgagccggggctagatgaagttcgccgccgcggtcgggagggattgcaaacggggatgttcgtgccccagggtggagaaaccaggtcgtcccgggcagggggctccagggttagccgcggagagccccgtgcgttgcacacacttaatgtgccaggcactgtgctgtttcacatgcaccatctcgatgagtcaccttatgaggcagacctcactgtccgcacttaacagaaggtgaatctgggattcagagaggtcagggagcctgtctgagatcacagctgagaagcctgttggcattcaaacccatgcccatgtgactccaaaggcagtgcttgaaccacctttggttaagggatgacaggctatgccgcctctcggtccagtcctccctggctggccgtgcccccgtgtgcaggctctgccctcggccgcattcccctctgagcaggctggggggtctgccatctccctcagacgcgacagctggtgaaggacggcttcctggtggaagtgtcagagagctcccggaagctgcggcacgtcttcctctttacagatgtcctactgtgtgccaagctgaagaagacctctgcagggtgagtgtgtgagtccaggggcacggggcgggggagggggtccggacctctgcggggtgagtgtgcgagtccggggcgggggagggggtcctgacctctgcggggtgagtgtgcgagtccaggggcgggggagggggtccggacctctgcgaggtgagtgtgtgagtccaggggcgggggagggggtcctgacctctgcggggtgagtgtgtgagtccagtggcacagggcgggggagggaggccggaccctgccacccatggagccttcagcaactttgttggttttttttcttttgagacagggtcttgctctgttgcccaggctggagtgcagtggtgcgatctcggctcactgcaacctctgcctcccgggttcaagcgattttcctgcctcagcctcctgagtagctgggattacaggtgcacgccaccatgccaccatgtctggctaatttttgtatttttagtagagacggggttttgccatgttggccaggctgatctcaaactcccaacctcaggtgatctgcccgcctcggcctcccaaagtgctgggattacaggcatgagccaccgcgcctggccggttttttccttttaaaaactatattaattaacttaatttcactacatagccttttttcctgaaagtaagtcatgtttttaattataaagataatataaggccattggaggaaaccccgtcccccactgaagcatgaggtccgactcctgccgcgctgcttccttccctgtttttaaatgttctcatgtttcttcacacagtcgtaatcactgtgaatgcccaatttggggctctgctgtttctgtttcgtgtcataagcattttccctgttgctgcctcatcttcataatcatccttttactttcctgcacgatgttacccgtagatgtgccatcgtctacttaagcattctccttttattagacatctctgaatttctgctaactgcagtgctgtgaatattcaccacgtctcctgctactatttattgagggtttatgccatgccaggtgccgtgacacatgctttgaatacatgatttctagtcctcccaacacctccacaaagtagcgactgttgttccctaatcatagatgagagaggagtcttggagaaggtaaataagcagcccaagctcgcacagctagaggcacaggtgggactggaaccccaagctgacgtgcaaactcctttgagcctccttctctctacccgggagggtgggactggaaccccaagctgatgtgcaagctcctttgagcctccttctctctacccgggagtgtgggtctgctctgtgccttgagcagaggctcattctgcgttcattcacacattcttccacccacacttagtgatcaactgcagtgtgccaagcacaccccttctcacggctgagaagcggcagtctggattcaaacccgtgtctgtgggactcgtttaccatcaggctatcttgcctctcccttcagccctccctggttggctgtgcccccaagtacagcacaggggactccacagccagtgtgttacaccaccaggctatcctacctctcccttcagccctccctggctggctgtgcccccaagtatagctcagggggagcaagccccacgcccacctcaacactcaagggtcagaatgagaagtgcaaatctaagtcctaggggaaggatcgatgattatgaacgtcaataaagggatgactgggcgggcacggtggcttatgcctgtaatcccagcactttgggaggccaaggcgggtggatcacctgaggtcaggagtttgagaccagcctggccaacatggcaaaactccgtctctactgaaagtacaaaaattagctgggtgtgatggcaggcacctataatcccagctacttgggagaatgaggtgggagaatcgcttgaaccctggaggcagaggttggagtgagtggagatcgcgccattgcactccagcctgggaacaagagcaaaactccatctcacaaaataaaaataatttaaaaaataataataataaaggacatgactccctggaactagatcatgtttgagatagttctgaggcagagatggcaataataagcacacatgcttctgcctgtcgtcctttgcgatggcagacattactaatcacatatgcctctgcctgctgtcctttgccatggcagacatcactaatcaactagggcacactttcttgctagacttggatgtggctttgtaatcctccacccagtgttgacccatgtgaccactcttgataagaggtggcatttggaataacacctgtattccattgctagcctgaaggatattgaacacggatagtctagaagggagggaggggattgtggtggggaataggaaaatgtgagcccagccaggaaggcttcgctcttcttgatacctaagtggtttgggatgtttgacaacatgagtcatctgggccagaagcctggtaaggtgaaggggcggagttgctccctgcgggcggggcggaccccagaacccagctttcatcactccagtgtgtgtttcccaatcaggctcctcaggagcagggatcgttcttgcttctggcgagttctcagtcaacccctgtcagtggttctgtggttctggacccaagagttgaggctggaagagccaggctccctctggctcatggctccctctggctcgtttgcaggaagcaccagcagtatgactgtaagtggtacatccccctggccgacctggtgtttccatcccccgaggagtctgaggccagcccccaggtgcaccccttcccagaccatgagctggaggacatgaagatgaagatctctgccctcaagagtgaaatccagaaggaggtgagcagagcttggtatctgagcctggggccctttgagccagctgtgttgggggaggtggaggcaggaagttgtaaggtttgagactttgagagggagccttgagtgtgtagttactaagggaaagaccccgactacagtagctccaagcagatcgagggggtcagtgctcaggatttcatagggctaacatgggaagtgccctggaaagcagtgcatgttgaacacgatagaaaggggaagcaagtagccaggcgcagtggctcacacctgtaatcccagcactttggaaggccgaggcaggtggatcacctgaggccaggagttcgagaccagcctggccaacatggcaaaaccctgtctctactaaaagtacaaaaattagcagagtgtggtggtgggcacctgtaatcccagctactcgggaggctgaggcagtagaatggcttgaacccgggaggtggaggttgcagtgagccaagaacatgccaatgcactccagtctaggcaatagagtgagattctgtcaaaaacaaaaaaaaaaagtggaggtagagggaagcaagagaagaaaaagcaggcttttgtaaggaaaagcaggacctgtgcaaggaaaaggacctgggaggcctctcagaaactgacagatcaagtaggcaaataaataaggagagagaggacctgaatgccacaattaacatgcttgacttaaaaatgcagagaagcttgtgccctgacagaaaactgagattcttgtcacacacgtttgggaccttcacatttatcctataataggccactaaggaaatctcaaaatttttctgcaagttgatagcatacaagtcatgttcacagaccacagtggagtaaaattagaagtgaacaagaatattggtcagcctgggtgcagtggctcacacctttaatcccagaactttgggaggctgaggatggtggatcgcctgaggtcaggaattcaagatcagcctggccaacatggtaaaaatccatctctactaaaaatacaaaattatccaggcgtggtggatcatgcctgtaatcccagcactttaggaggcccaggcaggcaggtcacctgaggtcaggagtttgagaccagcctggccaacatggtgaaaccccatttctactgaaaatacaaaattagcctggcgtggtggcttccgcctgtaatcccagctactcaggaggctgagacaggagaattgcttgaacctgggaggcagaggttgcattgagctgagattccgctgctgcactccagcctgagcaacagagtgagactgtctcaaaaaaaaaaaaaaaaaaaaaaagcattggtttggaaagttcaaactgacaaggtaaagaggaaatcaaaattcaaaatgagaactgcaaactgtttagtgctgtctggaaatgagtgtactacataccagtacccatggatgcagccaaagtgctgtttagaggaacatgaatagccctcagttcacataacaacagtgtctagaggaacatgcatagccctcagttcacataacaacagcgtctagaggaacatgcatagccctcagttcacataacaacagcgtctagaggaacatgcatagccctcagttcacataacaacagcgtctagaggaacatgcatagccctcagttcacgtaacagcagcgtctagaggaacatgcatagccctcagttcacgtaacagcagcatctagaggaacatgcatagccctcagttcacgtaacaacagtgtctagaggaacatgcatagccctcagttcacgtaacagcagtgtctagaggaacatgcatagccctcagttcacgtaacagcagtgtctagaggaacatgcatagccctcagttcacataacaacagcgtctagaggaacatgcatagccctcagttcacgtaacagcagcgtctagaggaacatgcatagccctcagttcacgtaacagcagcgtctagaggaacatgcatagccctcagttcacgtaacaacagtgtctagaggaacatgcatagccctcagttcacgtaacagcagtgtctagaggaacatgcatagccctcagttcacgtaacagcagtgtctagaggaacatgcatagccctcagttcacataacagcagtgtctagaggaacatgcatagccctcagttcacataacaacagtgtctagaggaacatgcatagccctcagttcatgtaacaacagtgtctagaggaacatgcatagccctcagttcacataacaacagtgtctagaggaacatgcatagccctcagttcacataacaacagtgtctagaggaacatgcatagccctcagttcacgtaacagcagtgtctagaggaacatgtatagccctcagttcacgtaacaacagtgtctagaggaacatgcatagccctcagttcacataacaacagtgtctagaggaacatacatagccctcagttcacataacagcagtgtctagaggaacatgcatagccctcagttcacataacaacagtgtctagaggaacatgcatagccctcagttcacataacaacagtgtctagaggaacatgcatagccctcagttcacgtaacagcagtgctagaggaacatgcatagccctcagttcacataacaacagtgtctagaggaacatgcatagccctcagttcacataacagcagtgtctagaggaacatgcatagccctcagttcacataacaacagcgtctggaggaacatgcatagccctcagttcacataacaacagtgtctggaggaacatgcatagccctcagtttacataacagcagcgtctagaggaacatgcatagccctcagttcacgtaacaacagtgtctagaggaacatgcatagccctcagttcacataacagtgtctagaggaacatgcatagccctcagttcacataacaacagtgtctagaggaacatgtatagccctcagttcacgtaacaacagtgtctagaggaacatgcatagccctcagttcacataacaacagtgtctagaggaacatgcataaccctcagttcacataacagtgtctagaggaacatgcatagccctcagttcacataacaacagtgtctagaggaacatgcatagccctcagttcacataacaacagtgtctggaggaacatgcatagccctcagttcacgtaacagcagtgctagaggaacatgcatagccctcagttcacgtaacaacagtgtctagaggaacatgcatagccctcagttcacataacagcagtgtctagaggaacatgcatagccctcagttcacataacaacagtgtctggaggaacatgcatagccctcagttcacataacaacagtgtctagaggaacatgcatagccctcagttcacataacagcagcgtctagaggaacatgcatagccctcagttcacgtaacaacagtgtctagagcaacatgcatagccctcagttcacataacagtgtctagaggaacatgcatagccctcagttcacataacaacagtgtctagaggaacatgcatagccctcagttcacataacaacagcgtctagaggaacatgcatagccctcagttcacgtaacaacagtgtctagaggaacatgcatagccctcagttcacgtaacagcagtgtctagaggaacatgtatagccctcagttcacgtaacaacagtgtctagaggaacatgcatagccctcagttcacgtaacagcagtgtctagaggaacatgcatagccctcagttcacgtaacagcagtgtctagaggaacatgtatagccctcagttcacgtaacaacagtgtctagaggaacatgcatagccctcagttcacgtaacagcagtgctagaggaacatgcatagccctcagttcacataacaacagtgtctagaggaacatgcatagccctcagttcacataacagcagtgtctagaggaacatgcatagccctcagttcacataacaacagcgtctagaggaacatgcatagccctcagttcacataacaacagtgtctagaggaacatgcatagccctcagttcacataacagcagcatctagaggaacatgcatagccctcagttcacgtaacaacagcatctagaggaacatgcatagccctcagttcacataacagtgtctagaggaacatgcatagccctcagttcacataacaacagtgtctagaggaacatgcatagccctcagttcacataacaacagcgtctagaggaacatgcatagccctcagttcacgtaacaacagtgtctagaggaacatgcatagccctcagttcacataatagcagtgtctagaggaacatgtatagccctcagttcacataacaacagtgtctagaggaacatgcatagccctcagttcacataacaacagtgtctagaggaacatgcataaccctcagttcacataacagtgtctagaggaacatgcatagccctcagttcacataacaacagtgtctagaggaacatgcatatccctcagttcacataacaacagtgtctggaggaacatgcatagccctcagttcacgtaacagcagtgctagaggaacatgcatagccctcagttcacgtaacaacagtgtctagaggaacatgcatagccctcagttcacataacagcagcgtctagaggaacatgcatagccctcagttcacataacaacagtgtctggaggaacatgcatagccctcagttcacataacaacagtgtctagaggaacatgcatagccctcagttcacataacagcagcgtctagaggaacatgcatagccctcagttcacgtaacaacagtgtctagaggaaggcaccacgggaggagcatccctgtgagtggaggaagggcctggagcggtttggtcagcttggtctgttttcctcacctctcaggttcagcttaggcctcaccacccctgggaagcttctctgacacccacgcccaccacagtcttggttgggtgccctgtccccagatcctgtggctttttgttcacctgtggctttgcttaaatggtactgaattgtaattgcattgtcagactcctctcttccccactggaatttgaactccagggacagcgctattttcttctgttccatgttcctcatattcgacacgtagaaaacaggtggttagggcccagcatggtggtttacaccggtaatcccagtactttgggaggctgagacgggtgggtcacttgaggccaggagttcaagaccagcctggccaacatcatgaagccccgtctctatgaaaaatacaaaagttagccgggtgtggtggtgggtgcctgtaatcccagccacatgggaggctgaggcaaaagaattgtgtgaacccgggaggtggaggttgcagtgagccgagatcacgccactgcactccagcctgggcaacagagtgagtgggactccatctcaaaaaaaaaaaggcacttagtaaacaaacaattattgaagaaaacataaccagatggcctctctgaggatcctttcaactcaagcatctccctttgaacaggggaaagcaagatcaccattacagccccaggagtgttcagggctgggggatgtcctaggacagagggtccaactggtggtacatctgcccagagggcttcctcgccagcacagctgtccccctcctgaacggctgggccctgcccacagtgcccgcccaggagcatcctgcgtgcctgtttcccacccgcccctgggaggcttgctgcctccccgttgccccagctgtgcagacgtggccttgtgcccagtcgagtcaacagtcaacactcagtgagccccactggctgtgctgcctggggtgtgccgggtgcctcatgtatatccctgtccagtggaggaagcagacacgccccttgctgaccacagagtgtggtacatgtgagtcactggagaggcacaggtgccgtcctctgagtcacagaagaagcagtgatttgttttttgttttttgtttttttttgagatggagtctcactttgtcactgtcgcccaggctggagtgcagtggcacaatctcggctcactgcaacctccacctcccgggttcaagcaattcttctacctcagcctcctgagtagctgggaataaaggcgtccgccaccacgcctggctaattttttgtatttttagtagagacggggtttcaccgtgttagccaggctggtctcaaactcctgacctcatgatccacccgccccggcctcccaaagtgctgggatgacaggtgtgagccaccgtgctcagccttgttctcttgataataattttttaaattttcatgttttttctaatccccaatataatactggctggttttaatgagaaatgctcgtagtaccagcatgtacagggtaaagctggtcgccactcacctcccactgctgacagtttgaggtgtattcttctgaactcttctttgcttatgctggtgtgcgcccgcgtgtccaatgagactagactacacgtgctgttttgcaacttcagcattttactccacagtgggtctttgagccctttggatgtatcagattctttttctttctttttgaggtagagtctcgctctgtcacccaggctggagtgcactggtgagatttgggctcactggaacttccacctcccgggttcaagcgattctcgtgcctcagcctcccgagtagctgggattacaggcgcccgccaccacgcccggtagtttttgcatttttagtagagacggagtttcaccacgttggccagggtggtctcgaactcctgacctcaaacgatccgcccacctcggcctcccaaagtgctgggattacaggcgtgagccaccgcgcctggcagtatcagattctttttaacaactgcctcctgctctgtcgcttggctgcatacaaatgtttttgggtgtttggattgtctctgattcttcgctcttagcaggcaagtcaacagtaaacatcactgcgcaggtgcctctgcagtaggttccctccaggtgggatgggcagggcagggtgagtgtgcgcttaattgacaggcttttacctctgaaaaagctgtgactggtggcattccccctgcggtgtgtgagggtgactgtcccccacagtgtcacaacactggctgtgaacattctttacaattttgccagtccagtgggttaaaaagaacaaaacaccatagaggtgaattctaactgaggagcttgaggatggccttgggagctgagacttgaagcataatggtggttaataaaagggagggggtcctttacgaaacagacagaaacttggaacattgagggagcaggctctgcccgcagaggatgaatgtctggtgagagggggaggctgagccgacgggacctggtgggttgtctgccgggcagggaggctggaaccctgccatgggggccttggtgccaggctagcaggtggggcttcaggctgaaaggtgtctgaggtttctttaagcaggtgtctctgttgtacccaggatttaatgtgtagaggcagcagagtgacagtacagagaggttaatactactgtaatatttgtattatttagggttctcaagagaaggaggcatagcaccccgcccagggccacgtggagaggtgccagctttgaacaggaggcaggaatggaaagaaagtgtggccacagcttttctgtggagaaacagggcagggaaagggcttggcaccagctggcttccgttatgtcggcagccctgggctagaggagtggtctctggtgacctggtccctggccctgggtgacgtggggcagaggagatgctggcttggcgagtgagcgtcaggtagagaaggtggttggggacatgggctctggatcagtgggtgtgtgtatgaaagctgtgctcatagggcatcactgacaggcttaggaattagtgagccctgtgggggagcagtttctcacccagctacccgcctctcctgccacaagatgtcaaaacatcacgaaatacggaaaatgtaaagagcatgttaacacacagtggagtgtcgtgcttagtgctgctcgtgagaaaggcccgagtgtgaggggaaccctctgtgtccccatctcctgcagaaagccaacaaaggccagagccgggccatcgagcgcctgaagaagaagatgtttgagaatgagttcctgctgctgctcaactcccccacaatcccgttcaggatccacaatcggaatggaaaggtcaggatgggtgggggtgggaccaagacagccccttccttagtccagagcagcccactctgtggctcctggccctgacctgtacgaaccggaaactcaggccccctcttcctgaggaggctgccatggctccagctgttgactcgctctcccctctcgtgtggaatgagtgccctctgctggccgtccctggcacagccgctcctgtcaccttggcttcccaggaaggagctcccccttcacccacccacccccagctgcctcctcctgcaaggtcagctgtgcctggataaggaggagctttgggccgggcacagtggctcatgcctgtcatcccagcactttgggaggctgaggcaggcgaatcacctgaggtcaagagtttgagaccagcctggccaacatggcaaaactctgtctctactaaaaacacaaaaattagccgggcgtggtggtgggcacctgtaatcccagctactcaggaggctgaggcaggagattggcgtgaacccgggaggtggaggttgcagtgagccgagattttgccattgcactagagcctgggcaacaagagcgagactctgtctcaaaaaaaaaaaaaaaaaaaagataaaaggagctttgttggggtccccaggatctgggagtacgctttgcctgactgtggtcacccactttatgcttatctcctctcttcagagttacctgttcctactgtcctcggactacgagaggtcagagtggagagaagcaattcagaaactacagaagaagggtaaattcctgcctcttccacgctccccaatgatgtccgtggcattgatgggccttttgtatttctaagcgtttcatgtccagtatcacgtctttggccctcgcagtcaccctcagaggtgccagggtgagcgtttaaggatgttacggattaattgagacccaaagaatctaactgattggctgaaagacatgatgatttagtcctgggactggacccagagcccagcctgggctttctctctctctctacctctctctctctctcacacacacacacacagagacacacacacacacacacacacacacatacacacatacacagaggctgggtacggtggcttacgcctgtaatcccagtcaggagtttgagatcagcctgggcaacgtggtgaaaccccgtctctactaaaaacacaaaaattagccaggtgtggtggtgggcacctgtaatcccagctactcaggaggctgaagcaggagaatcccttgaacctgagaggcggaggttgcagtgagctgagatcacagcactgcactccagcctgggcgacagagtgagactccgtttaaaaaaaaaacgaaaacaaaacgcatacaccacacacacacacacacacacacacacacacacacacacacacacacacacacacacaaacctcttcagttagattctcctactctgacccctctcgcagcatctacaccagtcctgctgtgtccacaaatccttccccctccctcgcaaggaccaagtctgccccagggattaagccgtcttcctgcagcagcccccagggaagagcagccggtcctggtggaccagtgcccacgctcccttctctctcggctctccctccagatctccaggcctttgtcctgagctcagtggagctccaggtgctcacaggatcctgtttcaagcttaggactgtacacaacattcctgtcaccagcaataaagacggtaagctcgggaaccagaggtggcccaaccggcaggtcccagccctcagagcgtggccggcttcccgtaaggactcagacagacatgtggctgtaaatggctgatccctgctcggctgtgctgagactgttgagtggccaggacacagcttgggtaggggtgactgtctactgagttcccagatgaccccagcttttccttgggcccctctgtctggcttgggagaactggcaccctggtgcactgagattgtgctgttaatatattcatgagagagcagacccggtagataaaatggtgtatgggaaatgaggctggaagtttccagggaccagctcttgaaaggccttgaatcccaagcaagggagtttggaattcatgctgtaagcccgggagtctgggggggttttgagcagtggggagctgtgatcagggctgggaactgaccggagtgggtgtattctagctgcctgtgtgctgggaaagggtccactttgtgaacggggtcctgaaggcaagctttcctcgacataaatcattagcagaatgatttatcatattggtcagttttcagtgccaggataggcaggatttggagggagagacagtacccatggggaatggtactaagtccctgggccaggatggtgggtgtgctggacccccccaggctgagtggaggagagaaggaccccctagccctaccccgggcagctcacatataaggccgccgtggccttcggaaactttttcatctggccaccaggtggtgatgttggaccaagactcagctgagtctcataccccgtctgcctcccgccggcctggggtggaggctgaggggatccgctgaccaccctctgccctgggggcttttctctcttgcagacgatgagtctccaggactctatggcttccttcatgtcatcgtccactctgccaagggatttaagcaatcagccagtaagtgccctggccaggacgaggttgggtgggccattgtggattctgcactgctctgcccaggatggggccctgccagcacgcctttagacatggggcattcccctggaggccagaaaccagctcctcttggcagggaggtcacccctggcctttgtctccaaagtcctctttctcaagccctccctgaagctgtctgaaacctaggggccgggcgcggtggctcacccctgtaatcccagcactttgggaggcccaggcgggcggatcacgaggtcaggagttcgagaccatccgggccaacatggtgaaaccccgtctctactaaaaatactaaaattagcgtgggcatggcggtggacgcctgtagtcccagctacttgggaggctgaggccagagaatcccttgaacccgggaggcggaggttgctgtgagctgagatcatggcattgcactccaccctgggcgacagagcgagaatccgtctcaaaaaaaaaaaaaagaaaccgagtgcgacaaacacgtggactccaacttcatatctgagggcgacaaacacgtggactccaacttcatatctgcccatgacaagctgtgtgaccttgggcaagtttcttaacctctctgggcctccactaaaaggcagtcacgcttgtgaattttgacccgagagcaggctgggatatgatcgtgtgtgtgcaacgctggtgtgctgccacgctcatcgctttttctccccttcccccttgtgggttcctcatactaaatctgtttttagtgtctcacaaagtaggattgcactttttaatttttaaaaaatttttttttagagacaggttctccccatgttggccaggctggtcttgaactcctgggctcaagccatcctcccacctcagcctcccaaagtgctgagattacaggcgtgagctgctgcgcccggcctggttgcgctttttatctacctgttatccacacgggaatctgtgagtcagttagacagctaatagtttctacccatttgccagaggaggtaaccgagtcacagagaggagaaaagacttaacatcacagaggatcagaaaccctgactctctccctctccacctgcccctcccactccctgctcttcactggcaggtggggtctgccctcacccctccctgcagcgccccacacagaggtgactccccgggccgttagagcagcctttcccaggaagcctccctgagttcctgggggcaaactggcctcccttctttgtcccttctttgtgcccacatcccctcaggttccttgtgcccccatcccctcaggttccttgtgcccccatcccctgaggttccttgtgcccccatcccctcaggttccttgtgcccccatcccctgaggttccttgtgcccacatcccctgaggttccttgtgcccccatcccctcaggttccttgtgcccccatcccctcaggttctttgtgcccccgtcccctcaggttctttgtgcccccatcccctgaggttccttgtatccccatccctttgaggttccttgtgcccccatcccctgaggttccttgtgcccccatcctgctcagggcaagctggttatggcacctgtcatgctgttttgtcacttaacaatttgcgtctcccactgtgagttctctgagggcgggaaccaggtctcctttaccctgggatgcatgggagctcagaaatgtggaatgaagtcgttaatttacacagcacctaccgtgcacctggagaaggtgagaacatggctggcgtgtggacgtactcacatgtgcaaagcctgtggcgtgttcagagcctctcagtctcacggtccgctctgagcctccggcatcccgccgaggtcacggaaaccatccctgttttacacacgaggacgccgaggctcggaggggctcaaggttccttcctggagtcacacagtagcaggtggtgcagcagaatccacgtcttccggcaccagagccggagctctaaccttttgggcacttctcgatgtctggccgggaacaccacacggtccctcaggctgcttgttaccgtggaagcttcctgaactctctccagacccacagacctcccttcttgggggctgccgctgaggagcttctggctagtgagctctgaagcactgtcccacccatgtctggaccaggcgccaccactccatgtccccagatgccgcccctccctctcctgcttcccgttggccgggaggtcctcgcctcagggagccgacccgtggcctcccagcctgggcgggtgtcagagccggctgagctgctccaaaatctctctttacccccagattatcctcactcccttcgccgccgccacccctgacccactcatatgtctgttctcactcagaggtgaggccctgtgtcttcagccgtggtaaactcaggacctctggacaggcaggcccagggtgtaggcaccatgacttttcctgctgtgcagacaggaacctggggagagaagggaggtgatctgtgcagagctggggtgtggacccagatggtctgactccggaaccctcgctctgaccctgtgagccgtccccagctccttccggaaccctccctctgaccctgtgaaccctcccccagcccgttccggaaccctccctctgaccctgtgagccctcccccagccccttctcgaaccctccctctgaccctgtgaaccctcccccagccccttccggaaccctccctctgaccctgtgaaccctcccccagccccttccggaaccctccctctgaccctgtgagccctcccccagccccttccggaaccctccctctgaccctgtgacccctcccccagccccttccggaaccctccctctgaccctgtgacccctcccccagccccttccggaaccctccctctgaccctgtgacccctcccccagccccttccggaaccctccctctgaccctgtgaaccctcccccagccccttccggaaccctccctctgaccctgtgagccctcccccagccccttccggaaccctcgctctgaccctgtgacccctcccccagccccttccggaaccctccctctgaccctgtgagccctcccccagccccttcctgaaccctccctctgaccctgtgacccctcccccagccccttccggaaccctccctctgaccctgtgaaccctcccccagccccttccggaaccctccctctgaccctgtgaaccctcccccagccccttccggaaccctccctctgaccctgtgagccgtcccccagccccttccggaaccctccctctgaccctgtgaaccctcccccagccccttccggaaccctccctctgaccctgtgacccctcccccagccccttccggaaccctccctctgaccctgtgacccctcccccagccccttccggaaccctccctctgaccctgtgacccctcccccagccccttccggcaccctccctctgaccctgtgaaccctcccccagccccttccggaaccctccctctgaccctgtgagccctcccccagccccttccggaaccctccctctgaccctgtgaaccctcccccagccccttccggaaccctccctctgaccctgtgagccctcccccagccccttccggaaccctccctctgaccctgtgagccctccccagcccctcgaggaggggctcacaccgagatcaatccatgatgacagcacttcatggcccgtctcaaacacacaggcccactccctggtctggcccaggctggggtgctcagggcctctgtgttgttcacctgcaaatccccagccccgttctgtgtgttctgaggcccacctgggtcttctttctgttgctccagctggaggcttcttggggtagctgcactgtcctttctgcaggaaagctggtttttttggtttttttttttttgagaaagagtcacttggtcgcccaggctggagtgcagtggtgccatctcagctcactgcaacttccacaccccaggttcaagcgattgtcctgcctcagcctcccgagtagctgggactacaggcatgtgccaccacgccgggctcacttttgtatttttagtagagatggggtttcaccatgttggtcaggctggtctcaaactcctgacctcaggtgatctgcccaccttggcctcccaaagtgctgggatttacaggcgtgagccaccttgcccggccaggaaagctgttctgatggagaatggcccagctgggcagctgcaggggctaagtggagtaagccacctgcactgtatgcccgcactgtgacctctgacgttgtttcacgctgcagagggttggccatagtgtcccaaaggcacctcccacaccacctctggtaccctgggaacaacctcggcatctccctggaggtgggaggactgctggggtccgagcccagggcgggtgtgggtttgcagagggcctggggtccgtgccggtgctgtggcctcagcagttgggtcccaaggtagattttcagcctgaaggccagggtggaagatggaaatgccggggaaagcccccggccctgccctcccgccccagccctccactgccttgttacctggagcgcttggtggtggtgggagcctcgttcaccgtgtgccagctgggttcccagccctgttcttggtactgcgggtacaccggcaggcaggaaaacccaggcttctctccacatggtgtttacgtcgtggggggagagagactagggacgcacgagtagagaagatccctttggtttatgttaagtgcagcggaggaaaccacagcaccctgggcttggggatgtgggcgttgttggtcgtcaccgcggcaggggatgctccgagcattcaggacccagaggcagggctgctaaacgcctcccaccccaaatgccgctgttgaggcctgggcacccatgttacggggagaggtggctccagggcggtcagtgaagagtttgtggtgtcgtctccatggtgaggaagatgtggagacggaacagtcaagggccctttagagggaggaggaggccagagtgtggggagggccgaggtgggaagggcagagtgtggggagggccgaggtgggaagggcagagtgtggggagggctgaggtaggaagggcagagtgtggggtgagccgaggtggggagggctgagcccctaagaagggggcaggggagaagccagatggtcccgggcttcagggaggagagagccaagatgccatccgtggggacgttggaaaggacagatgcgatgtccccctccatcctgagtgccgccccagctgccccaccctggccccactcactcagtatctccgtctgtccttcccccacagacctgtactgtaccctggaggtggattccttcggctattttgtcagcaaagccaaaaccagggtgttccgggacacagcggagcccaagtgggatgaggtgagtggcaggggctggcatctctgtggggaccccaccaccccgtgctcgtggcttgtctgctggggacggccagcccattggttggaccagctatgtctgcacccccctttctgctccctgctcctctggcttctgatcgcggtgtgtgtctgggtgtcagaccctgtggtgtcagctcaggcccccagactccaggggtgatgggaggcctctgggagctccagaaaatctgacgtgtccttcgtgggccgtgcttactccctcctccttgcaaagctgaggcacgcacctgccggaaagccaggcctcccagcttcggaggttcagggccctttgtcccatctttccccaggagtttgagatcgagctggagggctcccagtccctgaggatcctgtgctatgagaagtgctatgacaagaccaaggtcaacaaggacaacaatgagatcgtggacaagatcatgggcaaaggacagatccaggtgaggccagggcgccggggcgaggctgagggagcctccaggaggtggttccagttgaaaaggaattctggtcaaggagcctgctctttcgtgattttggttccaagctggttggaggaaagttcccaggaggtggttctcccctccctgctagaggtggctgcctgttgtggccccggaagcccaggcgtgtgcgtggctcctcaggtgggtcatctgcgcttctgcaagatggaaacaaccagctttgttttcacacgccagctttagtctatgggtggttgtttcccggaacgccatgttgagaaggactcagaggctgcgtcggtgaacgggagggaggaatgctgtgtgtgaggagccgtgtctgccattgacgggggaccggagttaggcacacggaccaggcgtttgctcttctgcccgaaagacttagggtcctgctggttggcttggggggaggggggtctctgacttgttgttagggtggccggaccttactcagctgcgttgggagtctgtggcttcgggtggggactctgggtgttagtagaggctgcacctcgggttaagggtatttatgcttctgggtgcggtggctcacgcctgtaatcccagcaccttgggaggccgaggtgggtggatcacgaggtcaggagttcgagaccagcctggccaacatggcgaaaccccatctctactaaaaatacaaaaattagcaggtcgtggtggcgggcgcctgtaatcccagctactcagtaggctgaggcaggagaatcgcttgaacccaggaggtagaggttgcagtgagctgagatcgcgcctgggtgatggagtcagaccgtgtctccaaaaaaataaaaataaataaaaacagcatttatgcctcaactgtgcttttggctccctataaacatatatagggaaaaggcctctgtgtgtgcagcctgtgtctctgaaacattctgccaattttgaagatggctgctattcaccaacctattaagagaagtaggcttgggagcgggaaaaggcgtgacgtggtggagccgctcacactcccgtctggtacctcgtgtggcctcgtgctgtgccgcaagtggtctggtttgggggtagattctgtgaccatgaaatgaagggagacggtaactgacccgtactgaggttgagcctcgggcgttgggcgtgctgagcttcttgacagtggccgcagacgtgatccaggcacagctgggcgccgagcttcttgaccgtggccccggacgtgatccaggcgcagctgggcgccgagcttcttgaccgtggccccggacgtgatccaggcgcagctgggcgccgagcttcttgaccgtggccccggaggtgatccaggcggcagctgggcgccgagcttcttgaccgtggccccggacgtgatccaggcgcagctgggcgccgagcttcttgaccgtggccccggacgtgatccaggcgcagctgggcgccgagcttcttgaccgtggcccaagaggtgatccaggcgcaggctgcgatggctccgtctacaacagggagctgaacgatgctttttagcaggaagcatttgttctctgatgcattgtcatggccaccgagtttggtatctggctcttacctgcaggtccttggtagcattgcccctggggagctgtgtgggtctcccactcgctgccccatctcaggctccagtgtttgaaccaggggccccacgtggaggggcctggcctctgccgcatacgccccgtgttcctaaacacgtctctttccgatgctgtggggtctgcaccctgcttctcagtactcgtcactagggagacagggctgccaggcaactgccagccagtccttcgtgatttaggaaatgggctctagagattcagtccctgggacctgctctctgtggggataaggggagggagccccatctccctgtccctgggctgggctagagggacaggcacggaagggttctgggctggcctgtgcagccccaggagacgcccaggcaagagacgagtggtcgccacgccacactccctgggccactggtggctgtggaatagaagagttacaaggatgtgccgggcagccagccccgtgggcacggtgggccccagcccctcgagaactcagctcccaaggcccgagggcacattcccccacctggacttcagccccattgcttccctccttctcactcagctgcacaagccccgggggaaacacaccatcagtcactgcaagcctcttggagacaggagcagatggaggcagtgggggagggaggaagccaggttatgtttggcaaagcagaaggcagagtctggtaaggaaaatgtttctgtgtttaagcttcgaggaatgttaaatgcctgggagttgatattaaaagaaacataaaccttcctgctgccagctgacctgggcctgtgagcggacagttcagagccagagtcccctgcaggcctttgaagtcccccagcactcagcatgccaaggcccggccctggccctccgctgcagaaccatctcaccagcctgcctttggtgggggaggcatgccccaggggcgggctgtggcttagaaagtctcgccccgtgactgccctcagagccaccgtggatggccaggctgggtgacgagtccacacggagctgttcccacgaacccgggccccacggagccacggaacggtctgtccccacagcttgtctctgccttcactccggccacacatctaaggaagggagctggcactagcctctggaatgcagtctttctgcccgccagcaggcgctgaggacatagtcggaggtggctttgagatagggcccagccctcggggatattcagggggcctgtaggaaaggcaggaggaggagggcagtctctgaggcccccacttctctctaagccccctcccagcagcccatccagagaaagcaaggggccctacggcctaagcgcaggcatttgctgctgtgatgaggcccccactctgggtcgcctgatggggcagtggggcaggagtctcagcggcggggtggggtgggggaagcatttagtgacagacagacggcagcatgcgtcaccaatgtgtgtccagcacttgtgctcctggaggccgcttcccaaatgccatctcctcgtgtgatccttgtcgtgatcctccagggagaatgacagtccctcctccccatcttacagatgaggacactggggtactgaggttaagtaccttggccaaggcatctctgcgtatggtatgtgggaaaggccatgttccctcctctgtgccatgtccccacgtctcaggcctttgtcaacgaatcccccagcccggacagagggccgtggcatggctaatggcctggagaagcagctgaggtgctgctttatggcataaggtgagcgtcctttgtcttggagtcctctgggcaggggacacttgtgcctggtgcccctgggaggaaggagaggagcacgtgcgggaaagagcaggaggccgaggtgggctgatcacgaggtcaggagttcgagaccagcctggccaacatggcaaaacccctttcctactaaaaatacaaaaattagccaggcgtggtggcacgcgcccataatcccagcactttgggaggccgaggcgggcggattacaaggtcgggagttcaagacccgcctggccaacatggcgaaaccctgtttctactaaaaatacaagaattagctgggtgtggggcccacgcctgtaatcccagcactttgggaggccgaggcgggcggattaggaggtcgggagtttgagactcgcctggccaacatggcgaaaccccgtctctactagaaatataaaaattagccaggggtggtcgtgcgtgcctgtaatcccagcacttcgggaggccagggcggggggatcacctgaggtcaggagttcgaaaccagcctggtcaacgtggtgaaaccctgtgtctactaaaaaaacaaaaattagccaggcgtgatggcgggcacctgtaatcccagctacttgggaggctgagggaggagaatcacttgaacctgggaggtggaggttgtagtgagctgagattgctccattgcactccagcctggacaagacagaatgagattctgtctggggaaaaaaaagaaaagaaaacagcaggaggggtacttagcatgcgtctgtgaggtccccagcccaggagggggtcctggcctccagggacccactgtcagattggaaagacgagtatattggtccatgttctccagtgagaagaatgctagatgtcagccacaatagccgtacacacataagcgagcccaggacgagcccagcacggtgctaaatgcttccatctgctgtctcaggagatcttcccaggaccctgtgggagaggaatatcatcacagctagaaagatgaggaagctggggctaaggagcccggacaaggccatgtgcccaggagtgggccagggcgggcagctggctgcagagcccatttctagatgtcctgctgcctcctgctataagaagacggaagattgtcctgctgtaagaagacggaagattgtcctgctgtaagaagacggaagattgtcctgctgtaagaagacggaagattgtcctgctgtaagaagacggaagattgtcctgctgtaagaagatggaagattgtcctgctataagaagatggaagattgtcccgcaggaattcagaggcagaaaggtcaccatgggctggaattagggaggcttcaaggaggaggtggaacgagagcgatttggaagccctgggttttttaattccaaaagcaatgtttgtatgagaaagaaaattgcagtagaagcaaagagacttgaaacctaatcagaaaccatccttcctccggctcctccgaagcagccagtttattctgtgccttttcccttcttgaggtatacacatttttatgtagatttaatcagggcctgttttgtctgtttttctgttttcatggattattataaacctccttttctctagagctgtatggagtcttcttaagcacctttttggatactttgttaaaagtactttatattctttgtagaaatcttggtatagagcggccagcgcaattgctatgctaaggctctgtgttattccagcaaggtgcgcaggctccgcttccgcagaagggagtagggtgggagttctggaggacagacccgcctggcagggaggcacgaatgtgaagggagggtcccaggaaagtcaggagcctcagcaggggtggcggggagctgcaagcaaggccagtagaaggaatgaataaaaggaggggattcctgggggtttggccggaagaggtattttttttttttttgagatggggtcttgctgtgctgcccaggctggagtgcaatggcgcaatcttggctcactgcaacctctgcctcccaggttcacgccattctcctgtcccagcctcccgagtagctgggattacaggcgcccaccaccatgcccagctgatttttattagtagtagtagagacagggtttcaccatgttgaccaggctggtctcaaactcctgagctcaggtgatctgtccacctcagcctcccaaagtgctgggattacaggcctgagccacggcacccggcctggaataaatcttagagggcgtttaatccaatcctgttttccggagagaaggaaatggacaccagcaagggtgagcgaggcagccgcggtcacagagcttgttagtgggtgaacaagggccccagactcagggaccccatccaggtccgcttagctgggagccccccctccaccggctcttgcccctgcccccggcgtagtctgccctggctcctggtcccaggggactccactgtgtttatcctactctatttccagccttgccgctccagctgcaacctacccgctagctgattagcatattcccagggtccggcccttcttggcgggctgggcctgaggagagcgctttcccttggggccccacagctcagtttctgccagcgtccccagactggagaagggcctgagaccaagaagctacttaaacctgaggggccctctgcaccccctgcccgccccccggccctgcgtcattccctcgctcaccgcaggctggggacagcccccaccccacagtccacctctgctccctgtgcctgggaggcagctccacttccccacgtgcctgccagggcagcccctccctgggcacagcagcgctgaagaccctgtggtgggaggggcaggttccaggccaggaagggagtgtgagccaccgcgtccggcctttattctttttaaagaaaaaatagtggtagaagccaggcatagtagctcacgtggtgtagctgtggactacttgggaggctaaggaggctagagtgagctaaggattgcgctactgtactccagcctgggtgacagagcaagagtctatctccactgaaaaaaataaaaaataaaagattgtagtgaaatatacataacataaagttaccattttaataaattttaggggccgggcgcggtggctcacgcctgtaatcccagcactttgggaggccgaggtagatggatcacctgaggtcaggagttcaagaccagcctggccaacatggtgagaccccatctctacaaagattaaaaaaaattagccgggcgtggtggtgcacgcctgtagtcccagctattcgggacactgaggctggagaattgcttgaacctgggaggcagaggttgcagtgagccaagatcatgccactgcactccagcctgggcaatagagtgagactccatctcaaaaaataataatttttgggtgcacagctccgtggccataggtggatttggtgctgtgcagccgttgccagtgtgcatatccagaacttgttggccctccccagccgaaaccccatccccattaaatcataactccccactcctgcacccttagcctccagtaaccacctgcctgctttctgtctgtacgaatttgtccagtctgggaaccttacgtaggtggaatcagacagcatttgtcctcctcatgtccttgagcttcacccatatgccgttgtgtgtctgaatttcctccctttctgaggctggatacaatttccctggatgtagatgccacgtctctttatctgcccgtccgtccgtggatgtaggtgccacgtctgtttatccgtctgtggatataggtgccacatctgtttatccatccatccgtccgtgaatgtaggtgccatgtctgtttatccatccatccatccgtggatgtaggtgccacgtctatttatccatccatctgtggatgtaggtgccacgtctgtttgtccttctgtctgtccgtggatgtaggtgccacgtctcttcgtccatccatccgtctgtggacgtaggtgccatgtctgtttacccatccatccgtccatggatgtaggtgccacatctgtttatccatccgtccgtggatgtaggtgccatatctgtttgtccacccacccgtggatgtagctgccacgtctgtttatccgcctgtccatctgtggatgtagctgccatgtctatttatccatccgtccgtggatgtaggtgccacgtctgtttatccatccgttcgtggatgtaggtgccacgtctgtttattcatccgtttgtggatgtagctgccacgtctgtttatccatccatccgcggatgtaggtgccacgtctgtttatccatccattcatggatgtaggtgccatgtctgtttatccgtccgtccgtggatgtaggtgccatgtctgtttatccgtctgtccgtccgtccatccgtgcacatttgggttgtttccacccaaaacgctcttgcctttcgttgagaaaaagaaccttgtccctgaggatggagacagcacagcctccttctctccagacccaagctctgtcccccacctgcctcccagctgtaatagatgagcaggacccgtgaccctagggcatgactggtcactattagtctcctgtagttgaagcacacagttgggccccctgcctcggccttctctccccctcccggccaagtgtccctgccccttgaccccttcacccttcttcctgggtcagctctttcctcccctggtcagtggtttaggtgcatcgaatgcagacgcagtcaccctgaggccgcgggaacaacctctggtcccttgacttcttggcatctcagtttcttcttttatttatttacttatttatatttatttgagatggagtctctctctgtcgcccaggctgagtgtaatggcgcagtcttggctcactgcaacctccgtctcccgggttcaagtgattctcctgtctcagtctcctggttagctgggattaaaggcgcccgccaccatgcccagctaattttcgtatttttagtagagacggggttttgccatgttggccaggctggtctcgaactcctgaccttgtgatccacccgcctcagcctcccaaagtgctgggatgacaggcgtgagccaccgcacccggccaagtttctttattgattcagtgggggtaactattcctaccccaccttcagcactggcttaaaggatctcacatacctggaagagccagtcggtgctgtgacgtgtgcgtccacgctttcacctgttcactcacttgtttctgtttacgatacatcctctgaatggcaggccctgggctgtgggtacaaagaatgaccaggacctcaccgtctggtaaagaaaacaagagaacttaggccaggcacggtggttcatgcctgtaatcccagcactttaggaggccgaggcgggcggatcatgaggtcaggagttcgagaccagcctggccaacatggtgaaacgccgtctctactaaaaatagaaaaatcagccgggcgtgatggtgcgctcctgtaatcccagctactcgggaggctgaggcaggagaatggtgtgaaccaggacccaggaggtggaggttgcggtgagccgagattgcgccattacactccagcctgggctacagagcgagactctgtctcaaaaaaaggaaaacgagaacttggatcgttagccagtgttgccggggttttgaggccagacagatcttgcggggctgagtctagctttctccatcgttagttgggagaacagagcgagtatctttgcctctgagcctcagcttcctgacctgtcagatgggctgtaagaggactgaatgtgagggtccatgaaaccctggacccggggcctggcatggagtcagtacgtggtttgccctaagctggcgggttcaggcaccctgtcccccacccccttccagtggttctgggtgtcacttgtccagcagccccctcctaaaggctgtcacctataagtggtcccctgggtcggggcctttggctggccgaggcagcattattttcttaagctgatggggtcagactggctttgctgaaccaacctcatagcaggggcggggaagtcaaggctggggccctcaatgccggctggcccgaggtttccctgccatgacccagcacggcagctctgagcttggcctggtgtggtcggaaacaaggggcctttgtcagcggctggggagcagcttctggtttcaattactctggagagcacgaggaagcttgcagagaacgtggggccggagcccgccagggcaggagtcaagggctcccctgccccacttccctccctctgacccccaaggggtgtcttgtccccattcgaccctgcctgagggtcctgcgcgtgcgtcctgggggccctgggttgtgagcccagagccccttccagctccggccccctctcgttcttcatagtggtactgggacccctcccaggaagatgatcgacggccggtaacgtgggtcctcagtgcttccccgttccaggcctcacgcgtgggccacactgaccacagccgggcccctggccctgagggaggccttgattcaactgggaaggaacacaggcctttccctttggttccatctctcccgtccccaacccctgccctggcactcacagcccccatagctccctgtcgtgggacaccggagtgacctctccctggaagatcagcccgcgtcggcgcccgccaaggccaggagtgcatgtcaggccccgcctcggctcctggcttaggagttccgcctccctgctgcttgccaccctcacagctggcccacgtggggctcttccctctgccgccacccccacccctgtgccagttccccaggcacatagggaccgtggaggctgagccccaggcctggttctacttcctgctgactctccacttcctcccagggccccgtgactgcagccattgtcctgctctggccctgcccaccccagctgtttcgggcacatttgttctccagcccagactcccacctgctgtccctcttcaaggcaggtctagacgcctggttctccttggagagtgggcagcagagactgtcctgggtgggggaagtcgggggagggtccctcgagagtgcctgccctgccgtcgaaagcttttccaaacgtggggcacgaacctctctcgtcagccctgctcagctgcctccatcgcccaggtgttcctgattttgggagcctggactctgcccagtggattctgggcaggaagcatccagcaggaagcagatggaggtgtgagtcggctccccccgctcccctccacccctgggaagtgccgcctcagcaggcaggcttggcgcccgctccccctgacccgcctctgaagggtgggcaccatgcagagaagccggtccagacaggacctcaggagccgatgcagtcaggccctgagaacatccagcctcccgacagaccaaaaaaaggtgttctcagctctgggtgccgggctcccagactcagaggcacgggacctgggtttgatcttagccggccaacctcgggtgacccttcagagagtgtcctctcgggtccgtggcattcagcgaactcgccgaggcgaaagccgcagacatagattcctccccgtgagccgctaacctccctgctggcggaggctgctgcttcctcctaggaatccaaaggatcagctccagggttgtcccactttccgtgttttctgaaagcttcaagagaaggatgccacagaagggttgccagagaatttcttgagttagggctgaggctgcagatgaatgctgagcgggggtcacctttagggtgggctctgctggcctccctcaagcctgcggccaccgcagactcacagcagcccctcgtggccagccccgcccttgccgtggcctgggggcgtggacattggtggtgctgggcgagggtctaagccccagtgtagcctgtagctttgggctggggcagggagggatgggcacaccgtgttcacgccctcggaggcaagtgctgagctgccctggcttcaggaaagaccctagcgcggctggagacgcaagatgacccagacacacccgcctgacccactagacaggtgctgtcccctctcgaggctgccagggcgaacccacagccactgagcaaaagccctgagtttcccaaaggagggagagaagcagagacacgactggagctgcaggttcagcgtctgacccagaggtgtccttacaaagcccctaatctctcagacccccacgtcccccaccccgagggagagcgaggccttcgggagaactgcctctaggagctgctgggaacctaaggtttgagctgtagatgcctgaaaggagggcggggcgctgaggtgtgcctcagattctgcctgtggggcgtgggaattccggggagggacgtgagccccaaggcaggcgaggggtggtggaaaagcaggtgtgagccagtgggccccacgtcccctcttcagccagggcgcctgctctctctgcttctgcttttatccgacgaggtgggcagggagacgtcggcataaaatttcatttggaaaaaacggcaggggtgcgtcctcagcagaaaagaaatctcaccggagaccatgtgtctgttccgagctcctgatttgacagctgtggaaactgaacccagagaaaaacacagccgttgagtccacaggtccctggctcccagggctttgcttctggccaccatgagctcggagcttgggtggaagggaggtgttcgggaatccagaatgaagaaagagcagggaggctcggcgaccccatcccaccttcaggcctcagcccctcctgcctcaggctgcaatttatggctgtgctgggagacccggccacaccccctccttcccgggaggaggagcaggcaagcagcccaggggggctccagcggtagggacagcatactgaggggccacgccctgcccactctgtccctgggtgagttttgttctagataagcaagatgttcccaaaggctcaagtgcatttttcacccttttccatgaccaaatgtgctgtgagaatcgctagggtttgccagggacgggctgtcgggacacttctcctgcagcagacaagctcttgggctgtttcagcctctcctccgtacctagaaccaccgagcaccctggcgacaccagcctgacgtggccagagagaggctggaggtcaggcagagggaggctggagctgtgtgagaagcagcacgtactcgggactgccctatgagccggcacaggcctttggggagttgggaggacagcaggttaccttgggcaggcctaggtctgggccgtagagcaactgatttcatcctgactgccttcttccttacactgtgcccatcttcaaccttgagcccaccctggacccctctcccagccccacctggatggatgggtgggtgggtggatggatggatggatggatggaaggatgggtgggtgggtggatggatgggtggatggatggatggatgggtggatggatggaaggaaggaaggatggaaggaaggaaggatggaaggaaggaaagaaagaaacaaacatagctcctagggtctaatctgccattggctgctgggtgactcctgtccccaggctgaatgcaggctctgaacattgcaaatacccagaggtatccgatgggtggggagaaaaacctagagtgagtctcagtgtctcattctgggaagacatttggccttccagtccgcaggttttggttagggtcggtacaggaaatggtcagaacacacagtaagaatgcagtgaccacagagccaccgagttgggggacactcccgtccccactcccccacagctgtccccggaacgtgccatcctcccgcccaactcgcacgccctgtgtgggcgctgggcaccccgggctcccatgctcggcctgcttgtctctctctcatcctggagcctgcacctgtctttgggcaggagccactggcaggctctctgcagcccccaaagcctcgggtccgccctgctctcctccagcaccttcttgccccccagcctcgggtccgccctgctctcctccagcaccttcttgtcccccagctctggtcctctgatgcccagccggtgccctgatcctctggtgctgagagagggagtgttcttggcagacctgagccacatcccctcggtccccatcctcagctgggtgccaggctcctcctgggctctggactctctgggcggcctcttggggctctccccgccccaactggctcccaggctatccccactggggcgcctgtggccttggtctagctggctgctcagaaaccccctctcctggagtcatttgcgctagcggataggacgaggaatcggggttcaagtgtgggctgggggagaggagcgtcgttctggtgggaaaaaggaggtcactccaggaaagcggcagctgcatttctaggttctgaggcagaaccttcctcctggtgctcacaggctggaggatttgcctggaagccgtccccacccccagctgtcaccgaggcagccccactgcagcctttgcccctcccgctcgcacagggcaggatgtgaccttttttcctcgttgatgccgccactgaacaccttaacccgattttacctcagtcacagctgtgctgggtggcatgaccccctccctaggtgtaatgcggggtcccacccacgtctccccggggacagcccctctcactccccttgcagagagcctggggaggggctgagggaggatgggatggtccactaggaatgtttttaattccaaaggcagtgacatctgttcgtgggggccttaccaccaggctctgtttatccagccgggggagtcttgcaggtcgtctgaggagggctctggcaggtgtgggggatggaaggggtggggggagcaggtgtgggggatggaaggggtggggggagcaggtgtgggggatggaaggggtggggggagcaggtgggggtagaaagggtggggggagcaggtgtgggggatggaaggggtggggggagcaggtgtgggggatggaaggggtgggggaacaggtgtgggggatggaaggggtggggggagcaggtgtaggggatggaaggggtgggggagcaggtgtgggggatggaaggggtgggggagcaggtgtagggggtggaaggggtgggggggagcaggtttaggggatggaaggagtgagggaggaaggagagtggccccttcccaggtggttgggatagcctgagctgaacccagcagagatgaggaggggtccgtggtgggctgcagcgactagaattcagacttctgcttttgctggggacatctgtcttgcacagatcttcttccacccaagaccattgactccaggaagcaatgagtcgggcttgggggagagaaggcaagtctgcgctgtccccagaggaagcccccagtccatagggaggaagggaaagatgagcgtctcaggggaagactcccaactcggctacccatctgcgaaggcacttatgtcaccatggagaccagctggccatcgttcatccagtccgagcttgctttacctagacaagtattgagcctgtggtacctaagacagatgagtgccgggccttgggaacgggattcacacggcccccttctcccccacacccggcggcagggaggggcgtgcattctcgcagtctgcaccctgtggcctgggacccagcccgagggaaggggaccataggccagtgaggggccgattctgaagttaagtcacggcaccaggagcactgtggcgcaaacgtggagagcagttataatggcatcctaccagccagttacatgacagccattgcacgtttgctggagggaggtagagtaaagctgggacccagtgagggtggatggcctttccctacagccccgagggccccacgctgacccctctcctccaggaagccttccccagttgcctccagctggaaattgtatctctcgatgttcgtggcattttgtctgtcctgttctgaggccgtaatatgggattttgtgcgggttttgtccatctgggcgtggtgcctagtaggtgcacaagtgacccgtgccaaatgcacaaatgcttgtctgcctcctgttgatggacatctctgctttcttggctgcccctttgtcaagcactgacttttgattcgtctctgtgatgccttaacccccaccccagggtcgggcacgcagccaggccctcagtcactacctctagagtgacatgagtggggccaggtgcagtggttcatgcctgtaaacccagcactgtgggaggctgaggtcaggagtttgagaccagcctggccagcatggtgaaacctcgtctctgcgaaaaatacaaaaattagccgggcgtggtggtgggtgtgtgtagtcccatctactcaaggggctgaggcaggagagttgcttgagctggggaggcggaggctgcagtgagccaagattgcaccactgcactccagcctgggcaacagagcaagacactgcctcaaaaaaaaaaaaaaaaaaatgacatgagtgggaccaagcagtggggcctgaggagtgagcagagccttcctggaggagatggctttgtggctgtgtgaaggggctgtctgggtcctcctggagccctggaaggggcaggcgaaggaggggtggagaagggtgactgaggcctcagttaggggacacaggcatgttcctacctccgtccgtctctccacctccccctcaggcggtgctggtgaggctgttgtggctcagcccccacttagcagctcaggtttgaggaagttccgtgtgcaccgtccaggggtgcgtgtgacgtgtgagccaggaagaagtggagctggtctggccgcccctgcagggacagtgaagactgaggcccggttctagcccaggcaggacgccccaaggcccccctccaccagccaggtggaagatagtccagggccagatcctgccacactagggcatcacagtgagtgacaggggtgtgggctttggagttagccagacctccgtttgtgttccagcttgtcctggccttggacacgtagctcagcttgtcagagcccttcgtttcctcagaggtaaagcggggatgctggtactgacttcatacagttgggaggggtaagtgacttaatccatgatgcctggtccctgccagccttccacgaaggacagctctgactacggctgtctctgcagggaagccacctattcctcaaaaacaccaaggcctctgaggagaaatcccgacacctgcctggctggtgacgccggatgccgagggctcgtctctgggccccgacccacctgccttggggtcaaccaagaaatgtcctgacccagctctttttcctgaatccaaagcatcatccatgtttgagtaaggcacagtgcttgtgagcaccaagggctttggagggacctccccatcctcacttggcactgtgtaaccctggcaagaactggacctcctgaccccctgtcctcacctctctagaacagggcagtaacaccaacatgacaagaatgtgaggctcacatgcagtcgggcgtttgaaagacctggttcgcggttgccacggtgcaaatactggtttcctttctgtgccgtgctggggtctgcagaggtccgaggccccagacacccctgggttttgcatagttaaacatttgggattcagcctttctcttttctctgaataccgtactctaacttgcactgttaccttgagacgtaatttgtgtcctagtctctgcggttagaaagttcactaaataaattgaaggtcaagaacaagttcttctctctctcaaggcgcccagcacggacacgggtggttgcccgtggcgtcctctgcgcccagcacggacgcgggtggttgcccgtggcgtcctctgcgcccagcacggacgcgggtggttgcccgtggcgtcctctgcccctggcagcggaaaccttttttggtgaggtgcaaagggccatggttcaaagtgacccctcaagaggcatctctggctggacgtgtgacccgcgtcgtttcgggcttttgctcctgtccctgagcagatcagtgacccgattcccactgggattcccacactaggggtctcctttatccttacatttctcacctgaggaggcttctgagtgccggtccacaagggtctggccgggtcaccaagctggctctgaggaaggtgcctggggcagaagttgggggtggggaagtgcgaccccagggcagtcagagtcttttgcccggggaggagggcagctgtttgtggccaaaatgcagcccccgcctggcccccggcccctccgcttggcccctggagcagcccggtgggcaacacggggacccagcagggagggactggggtgtggggctggtgtaaactttattgcgagggagggcggcggggtcggggaggagcagcgcccttgccagggatgaaacccggggttggggcttggaggggcggccctgggcctgggaggcggcgctcagcctgggctgcagcctcgcggagggcggggaaggagggatgcggaggagggaggagggaggagggacgcggacggagggagggagggaggggagcgcggggagggagggagggagggaggcgagcgcggggaaagccggcgggactagggaactagcgggactggcagccgggactgagcgctccacaggcgccttctctccagcgccgcgtcccgtcccccccggcatgaccgacgtcctgccccagcccgactgcagcccgaaggcggggcgcgaacccctggcgctggaggagtcggggagcaagcgcccccccaacaccggcgcccggctctggggccgcgtgcgcaacaagctgctccgaaacaaggtgcccgcgggggctggaggttccggggggtgggggctcgggggcgctgcggggctcggggggctgcgggggctgcgggggctgatggggtcccgctcccgccccctccgtggagtcccgggacagagctggggtctgtgcgcgtccctctaagtggcttgaacttgatggcgaacgctggggccgcccccacccggaccctggcgctcgggcatctgcccctgcctcgggagaagggaggtttcttctcggcaggtggaccctgctttccactccgggagtgcaaacagcgcacggggagacgcctgcctctgggtctatgtcttgccgccctgttcagcctctacctgatccctgcatccagcgggccttgctggctgcccctttgctgaggggcgccgaccgcagcaccgtctgccgtgtgaggtttctctgtgcaggattgtggggaggggagatgctgccgggtctgggggctcgaggcttcccttcagggaccacccatctgactgtgggcccagtgcccgccgggcaccaggcgttccgtccatgtgccagggcagaccgccggtgcccctgcagccccagacctgagttgggattaaaatctgagatagaagccgactgtcctgcagctgggcaggctgcctcggggctggcttggggccctggcatcaggcacgtgaggaagagccagacccagcgcccagcgcacaggaagtgctcgataactctgcagatcaaatcaactgtccgagttagctgtctcagagtgccagtccggctggccagggctgggcccatccatcaagagagcaacaagggaggccttggccagtccgtggtggggatctgcagctcctcctgaggctcacaggacctctctgcaggctcttactgccagccggcattgaggctcctggcatcagccaggacgaagtgatcttgggctcactggcccctcgttttgtttcagctcctgccatggggcatacttgacctcccagaggtgacatcagccctggaaagtgctgggcagggcagcaacttgagctgtactgcactggcccctgtgtcaccttcagcctccctggggactgggctagcagagccctgctggccccagctgctgccagagcccctctgtgctgaggcagctgtctgtgcccggcagcgtggactcatcccctccccagcccctgctgaggccagcaggcaccagcccagagctcaccatccatccccaaacgtcagggttggcaagaaactgacctggcaggttccgggtccagcgccagccaaacagggcgcttccagtttacctgcccctttgaggaggtgcctggtgggcagggggcaacttttaaacctgaggtcccagactttcagttctttccctatgcatttgtggccggcagaactgagaagccccttcaagaattccttagctgggtttgcctctggcagtgcctggtggctccgtgtctgatggggatctctgggcaggggtggtggccaggcagacgccgggctattgagctgctgagcagttggcgtcagtgcagctcagggtggccccggccctgggctgctctgtgtgacgagcgattccatcccctaacgtgtgctgtgtgccacagtgtgtccgtgtcgtggacgcaggggtcagcgctgtggcggacggagggacgtctgccacagtgtgtccgtgtcgtggacgcaggggtcagcgctgtggtggacggagggacgtctgccacagtgtgtccgtgtcgtggacacgggtcagcgctgtggtggacggagggacgtctgccctgtgcttcccacctcactgtgcgcaggccagcgggtgagcagcagagtcaaagggccaggcctcttgctttctatcctcagccacattaacctggcattttcctgcaggagcttcacagttgggccgaggggctgggactaggcagtttcgtttcggtggggtaagggaagggtgcctggtactgcccagactggcaggagggattgcctcattaactcctcgttaactttgccctgagtgatgctgtgggtgcgagaaacaccggtggccctcctgcttccactgacctgaaggttcattaaaggctggaggcggggcgtgactcatccagggctgggattaaacaatctgttcagatggaaaggtctcatgatcagaactgagcctttaaatagtgcagggcctctggtttctgggggagaggaggcagggacactcacggaggatcctttgggtaccagcgggggtccctgtggttgggctgttcttgtcaccggaggagagttcaggggccaaagcctcattccagcccctgacttggcagtcagctttttgtgcgagtgtttagctgggagacacgtggcatctgggtttgtgggttcagccagggctctcggtattgaacttcgcgtttctacttttctttccttttccctgtttgtttttttttttttttgcctcaaatcacactcaagtagaccaggcccggtgccttcctctccctcccatccttccctcttctagattcttggttgagctttggatgggaaggggctgaattctagattctcgcttgagctttggaggggaaggggctgaaggaggaacccccccaccctgcccccgcagcatccccttgtgggagccgtgaggaggctaagagggcctgaagggaggccggtccagaagcatttgtctgtcggggaagttgaggcccttatagagcaaccaagtccaagacgctcctgacccagaccaggccagatgctggccggcggtggggactcaggctgagccggcagggtgtaaggagattgagtgcagcttcaggtgaccttgtctctgccctgaagcacagccatgtgggtctgagaatcccctacttccaaagagctcctcttaagctggacaccggcactgctgacccccacggtgagtcccgtgttctgtgatgggagctgctgcctttgcttcagagaggatcagaggtgttacctgaggaagggcggggtggagagcccctcttgggccattcggggaagcttcaggctcatgatggtcttagaagaaggtccctttcttggatcacctgatgtcaggagtccaagaccagcctggccaacatggagaagccccgtctcaactaacaatgcaaaaattagccaagtgtggtggctcacgcctgtcatcccagcactttgggaggcagaggcgggtggatcacctgaggtcaggcgttcgagaccagcctggccaacatggtgaaaccccgtgtctactaaaaatacaaaaaaaaaaaaaatagccgggcatggtggcgggcacctgtaatcccagctgctagggaggctgaggcaggagcatcgcttgaacctgggaggtggaggttgcagtgagccgagatcatgccactgcactccagcctgggcaacagagcgagactcggtcttggggtggggggaggaaagggtccctttctttgtcagcttgatcgccaccgcaggacaaccccacccctcacagagcctgtcgtttattccttcttgatggtaccaggtgtgcagaccacgtgcacaccccagaggttcactctaccactcacttggccatcgagggtacacaggtgctgggtacaagatacagatatgtcttgggctcgtctactttattttataatccagtctgggcgtcaggaaagatctcgcagccttctgcaatagaagtctggcctggcccggctgcccaccgcccttccttgtttcccggtgggaagaaagcttcatcgtgcgtcttctctgttcacacacacccccatagcgacccctcagccacagacaggggactacagtgctgcctcccccgagagctggaggcccctacaccagcccacctcttcctgggcctatgtgtgggtcctgactgcggccaggctggctgacaggttggcagtggggtcgggcgaccctccctcttttccacagcacttacccacctgccgagtgggcagacctcactgctggggcctcatgagtactctctgatctctctgccaggccagctcccaagaggcttgcttgagtccgcagagcgggaaccctggactctgagaatctgatgaaggttctggaggccactcagacacagagccaccccatgcacacactgtgtgcgacttcagagggggctgcagacatcaaggcgggaaccctgctctgagtgaacttggcaaggtgccgcttcttggtacctagggagggtagaagggcgctggtcctccccggcctccctgcaggccacagacggcttggccagccagcggtgctgggcgcggtgccccagcttttggatggctctggaccagggagaggagaacctgccaatcaagggggttcctcaaaggccaaagctgcctgagcccagtgttgctgtagtacccagaggcaatgaggccccagacattttggaaggagcccccaagcctgcaggtgtggctgggggagctgccccaggcattttggaaggagcccccaagcctgcaggtgtgagtctgggggagctgccccaggcattttggaaggagcccccaagcctgcaggtgtgagtctgggggagctgccccaggcattttggaagcgcccccaagcctgcaggtgtgagtctgggggagctgccaggtgttggccacagggcgctggtgctggagaggcctggccctctgctgagtggcctcgctcactgcccaggtggttgggaactggtcagcaggtgctgttctttgacctcgtttcccctgtgaactcatgctggggcaggaagatgtttgtgtcctgacggccccccagcaccttcgaggaacagacagtcccctgcgcctgtgacctgcctgccccaccctggggagaaacgcagcgtcagtcctgggtccagtgagccgtagacccttggccctccaggatgggccctggagaggcgggaggggcccgtggagctggtcctgggcttctgtagagaggccaggaggccccaggatccccacagagacttccccagtcccgcttcaagacagcggaaccagctcctgagccgaaatctggagggatctcctttctggaccgtgaccccagccggggctggtaccgatgaccggcacagccagagccgtgacatccacagcgcccttcccatccgatgcctggatgccgtggctgtgctcggggaggcctccggggtccccagcccctcaggctcatgtggcacaaggtgccagagaagacagggcgccaggccggtgggagtcaaggtttcccatttttctcgtctcagtctgctacttaactgctgtgtgcccgcgagtacatccctttgcctctctggttctctggtatcagctcaatgaaggagctgaacaggatgatctcctggaatccagttcatgtgatgatcttggccatgtctcaagattcctagtcctaaaccttaaaccctgagcaccctgggagagtctgtcacagggctgcacctgggccaatgccagccattcagtggacacgggagcagggggtttagtgggaacacagggcttcttgagccctgtcctgaagcagccccggcggggagccattgtcacctccttcccccatgccccagttggttcctctggcctgtgagtattgccggagcaccttccacgtgccaggcctgcaggaactagggacacagaggcgcccgagacagacgagaccctgtctgcaggaggagtccgtcaacaaatgagatccttgccggtcagatgagtgctgtgaaaaaaataaacacaactgggtaacgcagtagagagtgacggggggatgcctggcttgagaggatcacttttgaacgaagatttaaatgacaagaagaattcagccataaaaaacctgggggcagtgcattccaggccaaagaaccggcaaggtccacaccccgaggcaggtgtgctcagaggcagagggggacagtgtggggcgttacgtggggtcaggggacggcggccaggcgacgtggggccctgcggttcaggacagggcctttaatccgaatgcagtgggaagccgcggggtgttcaagcacagttctgtgacgatatgttttgaacacgtactgtacgaggcatcattcttagcctgtgacgcaactgaggtgacacttacaaggtgctgttattcacactgtttatttatttatttgtttgggttcttttgtttttgtttgctgttgttgttttgagacagagtcttgctgtgtcgcccaggctggagtgcaatggcgcgatctcggctcgctgcagcctccgcctcccgggttcaagcgattctcctgcctcagcctcctgagtagctgggattacaggtgcccgccaccacgcccggccaagttttgtatttttttttttttttttttgagacggagtctcgctgtcgcccaggctggagtgcagtggcgcaatcttggctcactgcaggctccgccccctggggttcacgccattctcctgcctcagcctcccgagtagctgggactacaggcgcccgccacctcgcccagctaattttttgtatttttagtagagacggggtttcaccgtgttagccaggctggtcttgaactcctgacctcaggtgatccacccgcctcagcttcccaaagtgctgagattacaggcgtgagtcactgcgccaggcctaaatgtgttttgaattttgttttacatttttaattttttttttttttttttttgtgggagtctcactctctcgcccaggctggagtgcagtggcaccatctcggctcactgcagcctccatctcccaggctcaagcaatcctcccacctcagcctcccaagtagctgggtctacaggcatgtaccaacatgcctggctaatttttgtattttttgtaaagacgaggtttcgttatgttgcgcaggctgatgttgaacttctggcttcagtggatccacctgcctccgcctcccacagtgctggattacaggcgggagcccccgtgcctggcccagactgtttttatatatgaggaatgaggctcagagagtgactcagatgaagtcacgtgagtggcttagccgaggggcgacgttcagaccccggccactcagcctcagcgcaggctctcacccgcggtgtcctgccttccgtggccggttggggttgggctgcgtgccccagatgggagcgtctggagacgccgggctcctgcccgtcaggcatcagtgtggtgcccgtcctggcacgctgtgcatagcaacaggcaagacggttcttctcgacgacgccactgaacgtgagactcggagcaaggcaaggcctgggaggggccgctcagagctgacctgggccctggaattgctggagcccctcacgtccccggcagcaagctccatgcccagaaagtgttctgggcccgggcagggagggtgaagctggtatcagagaaggctgttgatgctgctttttttttttttttttttttttttgagatggagtctcgctctgtcgcccaggctggagtacaatggcacaatctcggctcaccgcaacctccgcctcctgggttcaagcggttctcctgcctcagccccctgagtagctgggtttacaggcatgtgccaccacgccggggtaatttttgtatttttagtagagacagggtttctccatgttggccaggctggtctcgaactcctgacctcaggtgatcctcccacctaggcctcccacagtgctgggattacaggtgtgaaccaccgcgcccagccctgttaatgtttcttaaccactccaggtccagctcgaggcttcagagcccatggaggtctgacaggtccttggccttcccgtggcctccagcgtgaagcttcctggtcaggaccacagaaggcctctcatcttggactttgacctctgagggcgcccctttcctttcaggacagggcctccgtgttgctttggccctggcctgttccttttctcaagagggccccactgcccctgcccttgccactctggcatcctcgacctgccctgggctggggcagggccggcttcctggctggtatttgtagcccagttctgagctgaagctgaagcctccaggctgcctgcacagggaggcagtggtggggtgggctggccctgaggaagacggagccctaggccgctgggggagatgtgcctggctgtggggcctccaagagcagcccaggtttggattttgtctgcttctcctcaaggtcagccatgcccagcccgggggctaaaagcaaagtgggtgccagggcaggcagaggctctggagtggacgtggggccggcagaggcgctggagtggacgtggggccggcagaggcgctggagtggacgtggggccggcagaggcgctgtagtggacgtggggccggcagaggctctgcagtggacgtggggccggcagaggcgctggagcggacgtggggcaggcagaggctctgcagtggacgtggggccggcagaggctctggagcggacgtggggcaggcagaggtgctagaatggacgctggggaaggcaggttgctgcgggtgctaagaggctagcctgccttggacaaaagcgtcgttcagagctgctaatccccttcctcccatgaggcttggggaacttcgaagttctctggtgttggaggggaagccagccgaggccctgggacacggcatcagcccgagcctatctgtggctggcctgggtatggcaggtgggcacaccttggctgcaggacaccttggctacaagggagcctggctgaccctgcagggtgagggctggagaggcggagcctgcctggcctagcagtgtggatgccaagccatgggaagatgtgtggagagtttatggagcctggcccggtgtccccaacccagctgctgagctggaagccaggggtaggtcctggcagcccctccctctctgccctgcctctctcggagtcgctcggagcagtcacgttgacggaatcctccggcgcctcctcgagggaggagaggcagggtcttggcaactcccgtctcccccgttgccagcttgccagccccgccgtgcctctcacgcctgtggtctgccccaatgacaggccggcttcggtgtcccaaggggacccagccctgagcgtggggctgcccttgggggagggcaggggaaagccagcccgggctgccaccgtggccgctggcctgggagccccaggaaacgtgcccaccctcagacccgatgcctggctcagggcctgggctccgcggcccctccagggcaggcgtgaaatgtgcccacacagctccaccttccacgtggttccctgtccgggggccacttgcactgaggtccttctggagtcattttctgtttttttttttttttttttgagacagagtcttgctctgttgcccaggctggagtgcagtggtgctatcttggctcactgcaacccctgcctcccgggttcaagtgatttccggctaattttgtatttttagtagagatggggtttcgtcaggttggccaggctggtctcgaactcctgagctcgagtgatccgcccgcctctgcctcccagagtgctgggattacaggcatgagccaccgcgcccggctgggagtcattttctagcgttcctgtcccacctctcaggaacagatttaccacctttgttgtgaagaagcattttttttttttttctgccgccaggctggagtgcagtggcacaatctcaactccggctcactgcaacctccgcctcccgggttcaagcgattctcctgcctcagcctccccagtagctgggattacaggcacccgccaccacgcctggctaatttttgtatttttagtagagacggggtttcgccacgttggtcaggttggtctcgatctcctgaccttgtgatccgcccgcctcggcctcccaaagtgctgggatgacaggcgtgagccaccgcacctggctgaagaagcacttttttttatgaacctctgcaaccccctctgagggaaaccctcccgcattctgggatgccggggctcagagggtggagggtagaagagcgccagccgtgagaggcaggatggggcggcccccgagggcagggctgtgcctggaggcagggctcctcggggggtcagctcctgggcggtgggagtgaccgagtgggctcctgagggaagcggctttcaggaaggaggcggaggcctgggagctcttggggccctggcaaatgtggtcttcagattcccgtcgtccagtgagcccctggatcacgtcctgagtggcgtccactgaaggctgcttgggacctctgctcccccctccactgagacccccagtggccagttctaagtcccacctgccttgggcagggccaccacaggccccttactgtggattaaagggccctgggtgagggcttgtgggaggggaggtggtggaaaccatctccgaagaccttggggcgagctgcgtgctggagtggagagtgtggcccagcaggcaggagcactgggttggaatgggggctctgccacctccgagggagcaggagtggagaccggagggagcgtgcccctgaatccgagcacggggagctggccgggagcagccctccgggcagaggcaggagaaatggggtcacctgccccagggggtgagaggtgagccgagaggaagggctgagaccctcaggggcatccccaggatgttcctgaaactcagccctggaggacgctcaggtgtgcgtggagcaccctctgccctggagcctcaaatcctctccccgctgcggggccactttgctgattcctgccccaaacatgaggtcacttcggtccagaaaggcgaggcgacctccaccagccacctacgggattcttggcagagaatccacgctcaccttcgggtcttcactcctgctccctcggaggtgacggagccccatttcaacccggtgcccctgcctgctgggttttcgccgcaggggacctggtcgtctcctggacatgagcccccagcgccagcgtttctctttgggagaggcctgaatgcgcagtcatgatttgaccaggcgaagtgcccagacaaagagaaaacagtcggccggatgcaggggctcacgcctggaatcccagcactttgggaggccgaggcgggtggatcacctgaggtcaggagttggagaccagcctggccaacacggtgaaaccccgtctctactaaaaatacaaaaattagccgggcgtggtggctcgtgcctgtagccccagctactcgggaggctgaggcaggagaatcgctcgaacccgaaggtggaggttgcagtgagctgagatcgcgccactgcactccagcctgggcgacagagtgcgactccgtctcaaaaaaaaaaaagaaggaaatagttgagctgctctcagtgaccatgtacggcccagtcgtcgacccctggcccagtcgttcgtccgccttttggctccacgatgttttgcagcctgtttctgtctcctgcctgtggcccaccttggggaggccccagtgctcgtgtgcccctggtggtcttcccagcctgacccttcacgagctccctctgtctccctgcttcaggtgatcagacatcccccaagtacctgctcccctgggcccatggaaggcacctgtctgctgggaccagagggtgagcagtcaggtgtcccatccaccaacgtcccaggggccagcccctccaccccggtgctaatctcatcaggaaatagcacagtccacatttcccaggagttataaatagccagcgcagttgcgggcagcagcgtttctctggaaaatgtacgctgtgcctctccctccctcctctgtgtttaaatgatatcctgaaatagacttggtttctggaggctgatagcctcctgggaaacagagcgtcgttgtcagggcaccgtggggccaggcaggcctctctgagcggataccagggccacacctgcagcaggcaccagggccacacctgcagcagataccagggccacacctgcagcaggcaccaggaagatgtcagggcttgaggggcttacagcttaggaaagtgcccctggcccaggcctggcctcagaaggggctggagtgtgtgagacagcagcaagtgtcgcctgggaggctgcagagggtagatcttagtggagcaggaaggcagagaggacccaaagtttcccactgtgacctggggctctccgagaaggctctctggaggaggcggggcgagaactgggccttagcatcaggaggtgcagtcctgggtcagatgtgcccaggttgaacctggcagctggagcggaagtgatgggcacgaggcagcgggagggctgtactgggggtggcctcccagcaccaggtctgcccaccgggtcgggacacacaccaggaggcccgatgttgcctttctgaggaagcagcagttacagcagctgcgggtcatggacttcacacattctgcagtttcagcagagagggtgctgggggccttgattttgaaccccagctctgacttcctaggtgtgcactgggtaaattcctcactctcgttaagctgcagcatcctcatctgtgagatgggagcggctatgagagcttaaaccgcatatgtctgctatcatgatcatgaacgcagatgctgtgtgtagaggattcatcagtgtcagacttgcaggaagagctcgagataagtccgttgctctcactcttccataacagccctgtgagtcaggtgtggatgcctccatgaggaaattgaagttcacggaggtgaaaggccttgcccgagtgcgcacggttgaatgggagactcagatcagcctgcctccaaatcctgcacactccccccgaccaggttgtgtccaggtccccctgagacttgggaagggaccattggctcagcttcctgcagaagctgccaggaggcacccagtcgtgggaagctggggcggaggaggggctgtgggtgaatcggaccaggggccatggaattggcctgaggcttatgctgatgtgtggagagacctgcctcaagaaggggtggtctcaaaacatcgaactgcgccccataaatacatacaactgcaatgtgtcaattaaaaaataagggcccgggccaggcgtggtggctcacgcccgtaatcccagcactttgggaggccgaggtgggcgaatcacgaggtcaggagatcaagaccatcctggctaacacggtgaaaccccgtctctactaaaaatacaaaaaattagccgggggtggtggcgggcgcctgtagtcccagctactcaggaggctgaggcaggagaatggcgtgaacccgggaggcggagcttgcagtgagccaggatcgcgccacagcactccagcctgggcgacagagcaagactccgtctcaaaaataaataaataaataaaaaataagggcccacacagtggtacatgcctgtaatgccagctcttcaggaggctgaggcaggaggatcactgaagcccagggcaacatagcagcctggacggcacagtgagaccctgtctctagaaaaataaatacaggccgagtgcggtggctcacgcctgtcatcccagcactttgggaggccaaggtgggcggaccacctgaggtctggagttcaagaccagcctgggcaacatggtgaaaccccatctctactaaaaataaaaaaattggccaggcatggtggctcacacttgtaatcccagcactttgggaggccaaggtgggtgggtcatttgaggtcaggagttcgagaccagcctggccaacatggtgaaaccctgtctctactaaaaatacaaaaattagccgggtgtgatggtgcgcacctgtagtcccagctaattgggaggctgaggcagaagaatcggttgaacctgggagacgggttgcagtcagccgagatcacaccactgcactccagcctgggcaacaagagtgaaactctgtctcaaaaaaaaaaaaaaaaaaaaaagagggcatggccgctccagaatgtttcttccaagggtagcatctcagttgacaaagagcatttgattcctccaccctgtgtggctactgctgggggacagagctggggacagacccaggcccggctccgtgtccagacgagatgaaggaactacgagggacagcctgtgtgatccaggagggtttgcaaagaacagaagcagcttagaggggagagaggtttcgggaaagtaaggccagagctggggcttcctttgagaccctgtaggacccctgcctccagccgggctggtgatggcctcacgcttcccgtgtgtgaagaggtgcccggagcagtggttctccctgaggggcacttggttctctgcacacacccaacttctgtctcctgttctgggttccatcccttctctgggcagggcgaacccagtgcagacccagaccccgtcggaggcttgggtaccacctgcccccagccggtgtgtgggtgatagatgtgggaaggacctacatcgagctgcaggaagcccaaggctgacccagatccagtttcccttccgtgatgacagtggcctgttatagcaactgcgttcaaaccgtggcacgcacacctcagagtgcacagagacgttctgagggcgacgtgggcaggagagttttcaggaaatcagtttgcagattctcagctgccataggtgctattgccagaaagccatctgcctgagagccagcatctcgccatcctgtcctctgcagaggagaggcctgaggctggctgtcggggcttggcccggggtgcgcagacctcctgggtggggaacagaggggcttttagaaatgttggggtaggggccaggcatggtgggtcacacctgtaatcccagcactttgggaggccgaggcaggtggatcgcctgaggtcaggagctcgagaccagcctggccaacatggtgaaaccccatctccactacaaataaaaaattagctgggcgtggtggcaggcacctgtaatcccagctactcgggaggctgaggcaggagaatcacttgaacccgggaggtggagcttgcagtgagccgagactgcaccactgcactccagcctgggcgacagagcgagactccgtctcaaaaaaaaaaaaaaaaagaaacgttggggtcagtgttcagaaagtaaaagactctagtggccacttagaacctttcaaaagtcaggtggtatccagttctttgccttccacaaaactgatggaggactcaattttcaactgagagatcatttcaagtaattttcagtaataggtatatatgcgatttaaggcggatagcatggagagaggttaaagaatggtgtaacgcggctgtgataaaactcttttcgacctcatctacttctttatgtgaacaaaatgtttcattgttcacatatttcttgttcattttagagacatggtcctacattgcccaggctggtctcgaactcctgggctcaagtggtcctgtggctgggagccacagcacctgcacatctttacaacaaaaccagaaacatgaaccaaattgatgctgagcctcgtttcactctagcaaaaaataataccctatagatacgcgaactaaagcaaaaaatgttccgcccatctcattgagagagcattccaccaaaaagttactctgctacttaatatttattaaaatgtataatgaggccaggcgcggtggctcacgcctgtaatcccagcactttgggagaccgaggcgggtggatcacctgaggtcgggagttcgagatcagcctgaccaacatggagaaaccccatctctactaaaaatacaaaaaattagccgggtgtggttgtgtgtgtctgtaattccagctactcgggaggctgaggcaggagaatcgcttgaacccaggaggcggaggttgctgtgagccaagatcgcaccattgcactccggcctggacaataagagcgaaactctgtctcaaaaaaataaataaaatgtatataatgtgtcggcttactttttttttttttttcttgagacagggtctcactctgtcgccaggctggagtgcagtggtgtgatcttggctcaatgcaacctccacctcctgggttcaagcgattcttccatctcagcctcccaagtagtagcttggactacagtgcccgccaccacacccggctcacttttgtatttttagtagagacagggttttgtcatgttggccaggctggtctcgaattcctgacctcaggtgatccaccagcctcagcctcccaaagtgctgggattacaggcgtgagccaccgtgcctggctgtctttttaattatgtactgccaatcatggtactaactaatcctgaatatattttgaatatttggagccttgtggtctctggaaatttttgttttcaatgtatacagattttttttgtggaagcaaaatgtaatggtgaataaaggacttgaaaatataaaaatataaactaggacaacattctttaggagaaatggaatagaaacaaattcaaggagagaagatccaggagctctgtgagggaaagaagagcttgtttgtgtagttttttgttgttgttgttttttttgagacggagtctcactctgtcgcccaggctggagtgcagtggtgtgatctccgctcactgcaacctccacctactgggttcatgccattctcctgcctcagcctccccagcagctgggactacaggcgcccaccaccgcgcccggctaattttttgtatttttttttttttagtagagacggggtttcaccgtgttagccaggatggtctcgatctcctgacctcgtgatccgcctccctcggcctcccaaagtgctgggattacaggcatgagccaccgtgcctggcctgttttcttaatattgaattttgagagttttatataataagccctgaaattgggtaatattagccctatagctgtgttctttttcaacattgtttagatgttttttctttttttttgagacggagtctcgctctgtcgcccaggctggagtgcagtggcgcgatctcggctcactgcaagctctgcctcccgggttcacgctattctcctgcctcagcctcccaagtagctgggactacaggcgcccgccaccacgcccggctaattttttgtatttttagtagagacggggtttcaccgtgttagccaggatggtctcgatctcctgagctcgtgatctgcctgccttggcctctcaaagtgctgggattacaggcgtgagccgccacgcctggcctcgtgtagtttttaaatggatgagtgtgggtatcacgtcgctggggtatttagatcccactgaatccatgagaaggaatgatgtcacacttttattttaggatggcaatattgacatgattttggaaatcatactctttgcaactatttaaacttggaaatgttcagattttgacttcagaaagtgccagggagcgcacagttgctcagaattagttcgcaggtgcacaggcagacgggcgcgaaggcccccgagttacagaaacagaacgtggaacagtcctgtgtgagggttgcctctgacctcccctggggtccgcacctccctgggctccagcccgagcctggggacttcccctgtggaggatttgcttatttgggagccaatggcttgacccaagttttctccctgaatcttcccagcaatcccagggaggcaggttctgttgcagatggaataactgaggcttagtgagtttaaaacttgccaggattcaaacccaggcagcctcctgtgcgcgggctcctgactcttcaacacctccacgtggatgggctggttccctcctgatggacttgagcgcctcctaatcaggtgcttaccttttgtgagcctcagtttctgcatctgtgaaatggggtaataatacccatgtcccgggctggcagccaggagtgcctaacagggtgtgccctgcctcccccacggtgggtaacagagtgtgccctgcctcccccacggcgggtaacagggtgtgccctgcctcccccacggcgggtaacagggtgtgccctgcctcccccacggcggccacaggggcctgggggctagggtccccccaaagggttgatttccaggtaaacatcagcttatcccagctgctcacttccgccttcctgactgtgtagctggctctgagcagtgctgacccacggggagatctctggcttggcctccgagctggcacctctctcacccacattctctctctgcagctggacccacaaaccgtggagaccaagaactggcacacggacgtgattgagatgaacggggtgagccggggatgggaatgatcagtggcgtgagccgggaggtggaacgtctgtgcagcaggtgggcagcccggccctgtggctgctcctggggccgctgtgccgcctcgacctccccgcagcccagccccctctcccctcctgcccacaccctgcccgctgctgtcctgcaggtgttgtgttgagggagacctgggtgtgagctagccctcatttgcagtcttggggaggggacccctgtgttttgggggcattcctcgggcactcacaccctggggaatctttacctgcctcaccccccaaccagatcaaagtggaattttccatgaaattcaccagccgagatatgagcctgaagaggaccccgtccaaaaagcagaccggcgtcttcggtgtgaagatcagcgtggtgacgaagtaggtgctgcctcgggtctcccagtcctggcgtcggtgccccgggtcccccccagcccgggccccccagccctccccgccggtgcccatcctggcacctaatcagttaccccccgctcggcggtggcagatggccggtgtggatctagagtggccgcagaggcgctcacaggacacttcagaagcacgcgagccagcacctaaacgctggaaggtctcttgtgagatcccagatcgtctgctcctcgtaacaagcgggaagctctgtcagccgggggcctacgtttgggctcggcaccaacggggactggcggcccctcgggaaagggcacgtgtcccccggttcaccaccaccctggccccttgtctcaggcctgacccacctcctcatgtgggctgcctgctgggcctcctacaagcatctgaatctgggggacgttctttccctagagtctcggccttaccttcccaagttcccaaggcttctcctgcccacgtccgtcgatgccccttcggcaggcctcgggtgggctggctggggtggggtgcggtggcctctttctctgccctgcccctgcccccgccccagctctccatcccaaatgctagaagctctccagggtgtgtgtgtgctgggtgggggttgctacgggagagctgtcgtgggggctgccctccacccatcctcacgctccaccccaggcgggagcgctccaaggtgccctacatcgtccggcagtgtgtggaggaggtggagaagaggggtatcgaggaggttggcatctacaggatatcgggcgtggccacggacatccaggcgctcaaggccgtcttcgatgccagtgagtctgggaggcccagccggggcaggtgtggctgtgtctgagcaggctggtgggatggacaggagagctcgggggaaccaggagcctccctggagaggaggcttgctctgcttcagagtccccgtggcaagtgctttctcttgtaatcccctcccctccaatctcttgtcccttgctgcaggtaagcaactgcagaaactcacaagggccgactcacttgcccaggatgacccaacttgtaggttttggttctggacttaaaactcagatctgactccagtgtctttcttgctagttcctgggtgcctggtgagccgcagggaaagagctttgagcctgcacctgctgtctccagggccccaggtcccctctggggcagtgctgcctctgcgtgaagcccaccatggtgaggcctgacctttctggtttctcctccctgctcctgctggttcaggtgcagcagccacataccccactgtcaagaaacctgcactggccaggcagggatgaatccgtggggagcctggagtggaggacggggtggggcctgggaactggccggcgttggtgcctctgtgcagcctagaagctgaggctttgtcggaacatgcttttacgtgtgaaaagtgtgcaatgccttccagagaggggcttagcgatggagaggttccagtcggaaggaagctgcaggccacatggtatgaatgtggctctgaactctgggtgatggatttcactccccaaacaccctttcccaagcagccacagcagatggcccccaggctatctctccctgttcccccaaccccgacccacagagccgagtcacagacacctgtgggccctctctacatcctgctcttccaggggagaccagaaccagagctggagtgggtgggggctgtgtcaggatgggtcgggggtggaacggggctgctggcccagctaaggctgcctgacctcggccccacccctgcagataacaaggacatcctgctgatgctgagtgacatggacatcaacgccatcgccgggacgctcaagctgtacttccgggaactgcccgagccgctcctcacggaccgactctacccagccttcatggagggcatcggtgaggccctgagggctcctaggactgggctgggccagactgagccaggactccctgcccggagaagtaaccagcaggagaaatatctgtggcttcctttgctggctgaccttcccagtgcactggggcctgtggctgaggggtccgagggtgaggtgtggcctgctgggacctggtgcagacactgggccctttctcgcctgcctcttgcccctgatgtccccatgggcagccccttctgcttcctatttggacgttggcctcttgcttggaagctcgagcatccagggaagactgccctgaggtgagtggccagaagccagcatcccagaaccaaggaggaggctggcttaagccatagggcactcgagatgggttgtgctgagccttccagcgggaccacacaccgtcccgtcacctctgcggagggccccggccagcaggccttccgcctccacccacctgggccaaacccagccccaaggaatcccttcagccttctctgctcctggggcagactggagcttcagcccccacggaaggctgcttgcacccacgctccagcagcagaaggggtggagaaagagaatccaccgctggcaggatatgtccctactggcttaaccttagccacacagaccagggggtgtcctgttacgagacaggggatgccccagcacccaaggcctatgcagtcagctgcaggaagggggtctgctcccaccagccggcctcctggctgagttaccagtcgtggtggggcctcctggaggaagcagctgctgacagcccacccagacaccaggccctcccctgtggggtctgctccccaaaggcctggaagcctgggctctctcccgcaggggcccacagcctcacgaccacaggggccctggcggggagccccaggagccaaacgccacactggcccttctctcccacagccctgtcagaccctgctgccaaggaaaactgcatgatgcacctgctccgctccctgcccgaccccaacctcatcaccttcctcttcctgctggaacacttgaaaaggtaacggggagcggccccaaccccacctcctcagtccctcctcatgaaaaggtaacggggaggggccccaaccccacctcctcagtccctcctcgtgaaaaggtaacggggagtggccccaaccccacctcctcagtccctcctcgtgggcgctggcctccatcgggctgtctgtggggagtgagagtttgctttccaagttcttgcactcatgtttttctgttttgagaaatatttgggtcccgtaaccagtagtaacctcaaatattgaccatagaatgctcagaatggcagggtgagagcccaggactacaggcaggttttataatcagtgggtcccaacctactggtggttcattcaacgaatgtagccatttctagatgcagtggggggtggacagcagtggggggtggacagcagtggggggtggacagcagtggggaatggacagtagtggggatggacagcagtgggggaatggacagcagtggggatggacagcagtgggggacagacagcaggaggatacattgtaagccttgatgcaggtgctgcttttcagttacatagagacgtgtggactgtgttacagcatgggttgtattgtgggccacagtcaaaaaaggtgaaacccactggtcttggcccacacctcactagacatagggaaactgagtccccacaccaggcggagacttgcttgggttagtagcagacctgtccttagagccctcaacttccagatcctaaattcagacccttcttgccttcccaccaccctttctagtcaggtccaaccaagagtggctaaagttggttgtacttgtagcaaagttcagaggtcctcaggcttgcgtggggaggtggtccctgggcgtcccttaaacccacctgcacgccaggaccggggagccccctcagactgctctgcggaacaattcttccctgagctcagccccagctcagggccaggccccccgctgcagctcagccacgccaggctcgggagagccagtggagacctggacgcgcccggggctggtgtcttgtttttcccatcatgaaacatttttcctctggtttggccaggactagagccccaaccaattccgaaagcatttggcaagccttgtggggaggagtgggaagggaaaattcattcggcttccaccctgggaactgggcacagtctgttcccacatctgggcccctggctggaccgtgtgcgcgcgtgtggtgaggggctggccccgctgcacagctgcctgttggcatcacagtgtttgtttgcctgtttccaaagcaggcgcagccacagctcctgcctggagggtgggaatgatggtattgagggtgagaggcgctgcttagggtgggtgggtctcagcccagaaacattttttgagactgaaggagaaccagaggccctctgatatgtttgctgaccctgggcctgcctggacaccagccctgatggcagctcctgctgttaccccagggaagcatcgcagagcatctggcctgttgagtaagagaagcaggagaggatccagagggaggacaatcctgggtcccacgaggcagacggagaggcataggaggcagccctgggtcccatgaggcagacccttccggagaggcacaagaggaagccctgggtcccacgaggccgacctttccggacaggcacggggggacagtccccgggctcatctggaagtagggctgctcctgccccagcacagctggcagagccccgggtctagctagtgactcctgctgggctccaggccctgcctgcctttctcccctgccccacccaccttaactcttcttttgggccacttagcacatgagaaagcaacagagcggtaggtcctggaggcagctaccggggttcaaatcccagctctaccagttgctggctgtgtgaccttgggcaagtcacttaacccctctgtacttcggtttcttcatctacacgatgggggtgacgataatcatatttacctcaaaggactgcggcgagtgtgagttgttccagggagttttcagaacagtatctgctctcaggcaagggagctggagttggcatctgtgggctccctggctctggcagttcaccatcagttcagggggacccagcagctggagatgttagcacagaacactggcacatggctggggccctgctctcctggatgagtccccttcccccgggggaggtccccactcctaggagacagagacgaggtgaccccttccaggagtccttcaggagttcccacagcgaaggccaagggtcctggagctccgagtggctgctgaggaagggcttctttcctccccatcttctccttcttagggttgccgagaaggagcccatcaacaaaatgtcacttcacaacctggctaccgtgtttggacccacgttactgagaccctcagaagtggagagcaaagcacacctcacctcggctgcggacatctggtcccatgacgtcatggcgcaggtaccctggcaccgcccgggcccgtggctggcggagggtgacggtcccatgacgtcatggcgcaggtaccctggcaccgcccgggcccgtggctggcggagggtgacggtcccatgacgtcatggcgcaggtaccctggcaccgcccgggcccgtggctggcggagggtgacggtcccatgacgtcatggcgtaggtaccctggcaccgcccgggcccgtggctggcggagggtgacggtcccatgacgtcatggcgcaggtaccctggcaccgcccgggcccgtggctggcggagggtgacggtcccatgacgtcatggcgcaggtaccctggcaccgcccgggcccgtggctggcggagggtgacggtcccatgacgtcatggcgcaggtaccctggcaccgcccgggcccgtggctggcggagggtgagaccagccccttaggaggagagagaacagctcagagtccccacacctcttccctcgtgggaagctgggttgatgggctatggggtgtcaccagggaggcaggactgtagacacttctgcccctcccaggccaaaacaaacatgtgagcctagaccagggcccagagatgctggctgcattctcaggagggcctcagtctcagaaagcaagcccaggggtggggagatgctgggcccttgtcctcatgggtggaagctctgaggttgcttccaagggcgggaggcttccctgggattcctgcaagacccagagcaggggccggactgtggccgcctcaggacagagcagaagcttatggccaggttggggaagtggccctaggcccccgaccctctgccccgtagcaccttccacggctgcagaaaggcaaacacacctgggctccccaggaaggggcggtggccggagccagtctagggagtgggaggggcaacacaggctggagtcagcaaggacgaggcctaggacagggagcccagcctccgccttcctgtctccccacaggtccaggtcctcctctactacctgcagcacccccccatttccttcgcagaactcaagcggaacacactgtacttctccaccgacgtgtagcccgaggcagggtggctgcgggcgggtggtggaaccagcccctccagcctggggtccaactcagacttgaaagactgcaatagaaaactcccaaacccagcactccagactcgagggaagccagcttccaagaactggaatgcgtacgtcttttgtgccaccttgtacaaag

SEQ ID NO: 15340 - DNA, 176357 bp, Homo sapiens
gccccgcgctcctcccggggacctggttcccggcctcctcgcccctccgcgctcgcaacttcggcctcccccggctcccgcccgctctccctcctttgttgcgcgatgagggtcgggtttcggatctgaccgagccgccgccgcgggatggagccgctcagccaccggggcctgccgcgcctgtcctggatcgacaccctctacagcagtacgtgtgccgggcgggggcgggaccccaggatcgggatcgggaccccaggatggagatcgggaccccaggatcgggatcgggaccccaagatcgggatcgggacccaggcaccgggctggtccggggagcgcgggcgggggcgagatcggggtccggatcggggtcgggttgggaatcgggatcggggtcgggacccaggagccgggctggtctggggggcgcgggcggggggtccccagagaggattcctgcggtccgggggcggggaccgtgggcggaccgagccgagagctgcgtcccccctcccacctgttgtgaacccggcctccgcgagcctcaggggagggaggcccttctgggtgctgcccccgcccctggaccggcagcttctctgtccaggctgaagccgaaaggccgttttgggagcagtcgttggcacccgagtttgccaccccaggggcaccgggtcatgtgtggttcagggcccaggggttcggtgctggggtgggatcgggtgggaggggagacggggggtgcagatatccgcgggggccgtttggatgcgggagctgaaaatcccgggctcagcaatctttcctgccagcctcatcaccacccccaccctcatcatcaccaccaccctcagaagaaaaaaaaaacaaaccttctcgagttctccaccccctcgctcccaaatctctctggatcatgtgattgctcttgcatggccccgggggatgcgtaactgatcacgggtaatggtgtgggggggcttggggcgaaccgagagccgccccccgcccccaccaccgcaccttgctcctgctccgttgctagaaaggcaccgccccttctccccacccttccctgagacacctttcccgaaagctctcagggattaggaagagggtcctcctgggcttacatagtggatttcgcccttcctggcccacgtgagtgggaccctcccactctctcagcacatctcccaggcaggagttgggggaggcacgtggggccacgtggagcctggttcagcctgattctaggcactggatgccatggaacaggagcgttttctttctttttttttttttttgagacggagtctcggctctgtcgcccaggctggagtgcagtggcgcaatctccgctcattgcaacctctgcctcccgggttcaagtgattctcccgcctcagcctcctgagtagctgggattacaggtacccaccaccactctcggctaattttttgtatttttagtagagatggggtttcaccatgaggccaggctggtctcaaactcctgacctcaggtgatccacctgcctcagcctcccaaagtgctgggattacaggcgtgagccaacaagggcatttgtaagggtcatcccagctagagttccttgataagtcatatggggggggtggggggagtagagaagggtgatgccttgagccccaaagccttactctggaggctgtgtggtacccaacattcaacctctgacctcagcatccccttgggtccaggtcattccctgtatcttcttctccacccgcctcctcctccatccatgttccttcctctcctccccccaggagctgtccttgtgatggttcattctgctttggtttctcaacatcaaaggggcaaagccggatcccctgggcataggtcctgtgccaggtgccgccgctccatctgctccttcccctgcagaggccagcgtcgttgggtgaaggtcagggcccatggctgtgtggcatgtgcgtgcacgtgcgtctgcatgaatgggggcacacatctgttcggagcgcagatgcagatcagctcctgacccggaggcaggattagtggccctctcttagctgtgtgcttgcaaacagccgtcataacaatgcctcagattcacgcgtgcttatgttcctgagtgtttctggctctttgcaaaacccagttcttgtttccctatttcccgaagcctggaatcgtatggaaccctgtctctagctttctctgcagcagaagactcctctgagctgatcatttccaagtcttccataccccaccctcttcctcccacgcctggagcaaaaaagcaaaattgcctgaggccaccttgaaaattcctgaccagaggaatgccagaaaagggaattaggccaaggcctcttagggggttctgttgggcagccctgattcaggcagattggcacctgagctgtctaccctcctgctgctgccctggcctctgggcggctcctggggtggcctggatggtgggtgggagggggcactgatgtggccgcagtgtgaggagtccctgcctccctcttcggaacagcttagtggagagctgtagcaggaggcttcccggggaggtgctgtgcagtcatgtttgggctgttagccatcaactttcctcttgacaagagcctaaattaaaacaaatacccgagctgtcatttgcctggcagcaaggttttgtggctcccagaggaagttcctctgcttctcaggaagctgtttgcttacaaggctcacagtcctggggtgacaaatctccacaaatgccagatccatcgggaactgtaaagggggtatacccagggcacagggtggcagtgtgacttagagatgggaatgactcggtgttagaggttccctgccttcctctctctgagcattgttcctggtaacaatgataatagcgtctcctgagcacctactgtatggcaggcactgggatagtcactttctctttctttcttttttcttttttttttttgttttttgttttttgttttgttttgagacggggtctccgtctttgcccaggctggagtgcagtggtgcgatcttggctcactgcaacctccacctcctggattcaagcagttcccctgcctcagcctcctgagtagctgggattatgggcgcctgccaccacaacccagctaagttttgtatttttagtagagatggggtttcaccatattggtcaggctggtctcgaactcctgacctcaggtgatcttcccaccttggcctcccaaagtgctgggattactggcgtgagccactgcgcccggcctgtgctaggcactttctatccattctctccaaatctcacaactctgcaactcttacagagtaggaaagtgaggctcagttagcataaatcatagacctaagatcacataagtaacaaatggctgagctggaattcaggttgtaccctagaataatgaggaggatcccgagtaccacctgggtatgtctgagtttattcaaggtcttgggatgtcacggaatgggggacgccattctctatggtcctctgttgcagagttctccctgaaacggtccagcagggtaaatggcttcaatggctctgaccccaacctggccctgtgcctcttgcaggacctgggggctgggcctggagcccaggcagggacagctgaggctgtctgaacccactgaggctggtggctctctgctcctaaggtgccagcctgccagccagcccctcccctcacacacttcttttttttttttgacacggagtctcgctctttcacccaggctggagctggagtgcagtggcactatctcagctcgctgcaagctccacctcccaggttcacgccattctcctgcctcagcctcccgagtagctgggactgcaggcgcccgccaccacgcccggctaattttttgtgtttttagtagagacggggtttcaccgtgttggccaggatggtctcgatctcctgacctcgtgatccacccgcctcggcctcccaaagtgctgggattacaggcgtgagccaccgcgcccggccctgaacacacttcctgcctttggggttggcagttcattctttctggttttgacaggaggagtgtgcccacttccatcacaggtttggtggtcatttgatgagggttgggcagcaaaccctccatctctcctatggtagaagtcctgaagggctgcggtaagtgtgatttgtctgcctcaaggagaagagttggatcccagctgccaggggccctggggctgatgggagcagagtcctttccctgtggagtgacagatggtttcagacatcccccagttcttgtgtctgcgccactcatttgcctgtattaatgtagcaatgtcagtttcacccctcagtaccttacctttctctccctggggttgctatgatgctctctctgaggctctcttttttttgagacagagtctcgctctctcgcccaggctggagtgcggcggtgcgatctcggctcactgcaacctccgcctccccggttcaagcgattctcctgcctcagcctcctgagtagctgggattacaggtgcccgccaccacacccggctaatttttatatttttagtagagacggggtttcaccatgttggccaggctggcctccaactcctgacctcaggtgatccacccgcctcggcttcccaaagtgctgggatgacaggcgtgagcccctgcgcccggccatgttttcttggtcataatgcctctaggtctttaatcaccctttctgctaaacacgtatcatcttctctttgttatttttttattttatttttttatttttattttcccaatcccatgggattagattggattaaatgggagcggagtagcccaaaatgggggtggaggtgtgctctgacactttcttggtccctgggattctccaagcagatctggatcaagacatacgtgtgccccaggcaggttgatcatctggcacctcttcaactggaaaatctttatatgtgtgtttaggacttacttagaggagaggcagaggctgtatttaaagcctctccctttgccacttcggcctccatttggtcccaagtaatttagtcctggtgtcaaacataccttccctgctgagccaagcaagagcctgcagtggcttggccgtcatggaaggcagaacgtgaccatctgttgttactagagcctgctttttggagctcacttctcttaccccaagcaacatttccaagggcgatttcattctcttgtgatattttcatgccctttatagattcagtgccccatctatgggccaggaaagtatttggagcagtggagatgtaagcctgtctccaggtgagcatgagcctacctcagtttctcatctgagccccacattctctacaccagggaccaagccactggtctgacagcctgtgtgcgtttgatcagagcagttcagttctcggggccgcatcagacccctccgtgtgtgctagtgagcgcctgctggcagatgcttgcttgttttcggaatagcccagtaatttattcctttttgtcaacaccggcccataatcttcatggctgctggagtctcagaggtggggctggcagaagaattaagtcatctactcagagaaacttaggtttctgtggttgtgattgttggctactgttgttcttcgggaaaaggaaggaaatttgtggggaattggctggaagatgctgttaggaggatggaagatggggaatggcggggaggctctgcctcactcttgcgagtaggatggaagacttgttctctgtctgaggtatgatctgctttctgggacaattccggtaccttccttcgtagagggagggcatgatggctctcgtgggtgttgtgtggattaattcatatttataaagtgctttgaaggtgaggagagctattgagcagctcagctgtccagctcattgcgctcctcatccgggaaagcctcgagggactgggagaggccggcacaggacttaggaaggggcagggaatgtggcaggaggaccggcaggaacagggtatcagaccagctctgaggcagcgcctcccacagcggctcccgcacaggccctccataggtgttggttgtctgagtacgggtgggaaaaagaaaactcgagttcttggctccttgagctcctccccgcagcagaaacccctgttagctgaaacctgtcagctggcccgtccatgcgtttccggctgtgtggatttggtcattgtactcgctcgtagtggagtcagagacccccaaagggagtctcgcgcttttgccagggtttatgattggaggacttcactgccagcgttggcggcagctgtttggctgagcttgagccctttgggcgcaaacctagggcaggcggcttcaagacaaccctgcgcccactgcccctgccaggcccttggtggtggcgggtgttggtgatgtgtggggggtgggctgaggtgatgtgttgagtggactgaggtgatgtgttgggtgggctgaggtgatggggggggtggactgaggtgatgtgttgggtgggctgaggtgatgtgttgggtgggctgaggtgatgtgttgggtgggctgaggtgatgtgttgagtggactgaggtgatgtgttgcgttgactgaggtgatgtgttgggtggactgaggtgatgtgtggggggtggactgaggtgatgtgtggggggtggactgaggtgatgtgttgggtgggctgagatgatggggggggtggactgaggtgatgtgttgggtggactgaggtgatgtgttgggtgggctgaggtgatgtgttgggtggactgaggtgatgtgttgggtggactgaggtgatgtgttgggtgggctgaggtgatggggggggtggattacctgctctgttctatattcttggcacttttctccaagtgactgtttgtaccagggggagagttctgcagctcacccatctctggggctgtgataggggaggctgtttgtgacatgtgaccttggcttgtccccacatgtgagaaagtccattgctgctgtggggagtagcttgcttttcttttcttttttttttgagatggagtcttgctctgtcacccaggctggagtgcagtggggcaatctcggctccactgcaacctccacctcctgggttcaagcgattctcctgcctcagcctcctgagtagctgggattacaggcatgtgccaccacacccagctaatttttgtatttttagtagagacggggtttcaccatgttggccaggatggtctcgatctcgtgacctcgtgatccacccatctcggcctcccaaagtgctgggatgacaggtgtgagccaccgtgcccggcccaggagtagcttgcatttcttagggcaagatatggtcagttggggacatgacgctgctgggagcagcgggaatgttccactggtccctgaagcttgaggagaacctgacccagagaccttgtgaagggggaaggagaaagaaatcaggccaataggcaggctacggaaggcacccccgtatggaggctgaagataatgcccaatcccacccctgcctgggcatttggcaaagagccctttgaggcgggaccatctgaggccgtggccacttgtggatggagcagcgggttctctgtccccgggtcgagacctgactggggcctctcgcccagttttttgtccaggctttatcctgtgtcctcctcctgcccttccttcctccccacacacactagaccgaaagatgaatctgggtttactggctgtatggaaaatgtcagagtcagcctgggcttcagtagatagagccagatgtggtcggctctgtggtgacctgattgattaatcgggtgccactcccctctttcttcatttttttgagacagattttcactctcgttgcccaggctggagtgcagtggtgcgatctcggctcactgcaacctccgcctcccgggttcaagcagttctcctgcctcagcctcccgagtagctgggattacaggtgctgccaccacgcccggctaattttgtatttttagtagagaagggatttctccatgttgatcaggctggtctcgaactcctgacctcaggtgatccgcccacctcggcctcccaaagtgctgggattacaggcgtgagccaccgtgcctggcctcactcacctccttcttgtccctgccctcacctctgatgccttggtgtgcctctaggtcacaggtggacatggcacacgtgattgggcatcttgcctaaggctagcagggtctccaggaagtcttgggtggctgggaggcctcaggtaaaccagagccaaggaagctcagagtccttgtcactccgggcagcttggctgctggactccccggggcatcggtggagctggtgctgcctagagaagcctggtattgagcagggatctgtgggcttactcggggctgttggggaaggatgtggccatcattaccttcgtgggattgaagggctgcttctgtgagtgttctgggctaaccccttcctcctgggcagcggctcctggtcagcagcaaaggtttaatggatcgagattacggggaccaaagacgccgtgtaattaagccagttatttctctggctgggaacatctactcctcacagccgcaattgacttcgtcacttgtggttaccccgttcgcgttacctcgggcctaaacagcccatacgtcatctttttgagggagtctctcccttggaggcaaagttttaggagaaagatccctctgggagttgtagagtcggcgtggcagtgtgtgctattgaaggtgaagttttaggagagagacccctctgggagttgtggggtcagcgtggcagtgtgtgctatgcaagagtgccccctgcagttgttctgtgcaatggcgcccacgggagcctctttgggaactgtgtctgggttctgtagagggacatagatagaaacctcatccttgggtctcccaggatcctggggtcccgtgaaaagaaagtccatcagtcctgatggattcatagaaactagtttttaatttggtttagaaagaatggaagagacaggccaggcacggtggctcacgcctgtaatcccagcactttgggaggccgaggtgggtggatcacctgaggtcaggagttggagaccagcctgaccaacatgatgaaaccccgtttctactaaaatacaaaaattagccaggcatggtggcaggcacctagaatcccagctactcgggaggctgaggtaggagaattgcttgaatccgggaggcggaggttgtagtgacctgagatcacgctgttgcactccagcctgggcgacagaatgagactccatctcaaaataaataaataaatacataaacaaactaaattaattaattcaaggtcgcagactacaagccagggactgtgcgctcggttggccctgctgtaaactgtgttctttctcccgcactcttacccttcacagcggtgctggtgggggctccttgacgctggtatttcactgaggttgatggatctgggttcatttctctagctagaaagacagttgtgaagactgcgtcttgcccccaagcccccgtgatatgaggagacagccctctgccccaggcatcctggaagcactgggagcatccaccaactgggctgcctcttcctaggggcatgagcctaaggaggtctcctcatgggcacttggagcccacgtgcctgcattgctgtgttcctggaattattggcaagaagtgctgattgttaacatacacaaacacaccccccccccacacacacacacacaaacacaaacacaaacacacccccccatacaaacacaaacacagagaaagggagagtgagaatagactttggcggttgggatggagcagggccagtgcccagtttctagagcgaggccaggggcgaggacgcggggatttggcagagcccaagcgtgctggccctgctctccagccttttaaaatccacctccacatttcaaaaggaaaataaagagagccctcagccataaatcaggccactgagcatcgaggtcctttgccgaggcccagggcctgctgggctgcagagccagctgctgtgtttgaactctcccgcgcgcagcatgttaatgacggggcagaccctccagacccaggctcacacccacgacggccctcgagcccagagagtcccccacggagaggtcagcccctggggaaggcctgtgtctggggggcttacaccttagcggagccccctttggctgggacttcaaatcaagccagacccttctgtagctctggattctggccagatgaaaggtaacccctgacacagatcttttgagcccatttcccaataggaataaaagtaacaaagcaattgattggacacctcacgggtgcaagagtagagcgagcgttctcacattcgtgatctcatttcatcttcacagtaaacctatgaaaggttgttaccctgattttaaggataagaagggggattggccattgttcttggcctctgctggtgacttctgccatggggggcaccctgagggggacgcaccaggtcttctctgccctcctctgctcaccctcttcctgcgtggcggaagctcaggcatcatctggctttgtgagtgcctctgtctagacaaaacccacgtcctccctccctcctctttcccctgcagggccagctttggtgttaatggagcagaaagccttggtagttactttgcgagtgcgtcacggggagggtcatgagagaccagctggcgtccacccagccgcgtggaacagccaccttgacttggtcgaggccagcaagcgtcttgcagaccccgtggcagctcctgacccacgttcccccttgggaggcctggatgagctggggcaccaagtgccatctttgggtgtagaatcttcagaaaccaaaggcaggagctgattcggtctcctgctccctgggaagaaaggatggaacgcacattggctgtcaggagagctgctgcttctagccggaggaccttgctgcagctggtcagctgccagcacagccaggcccttgttgtgggtgcctgccgtgtctgtcctcaagcccctccctgagtgaaggacactgttccctttccaactgcctgtggctgtgctagaccattttctctcctttgcccagaaaccttcagtgggttcagtggggcattgcctttcccaccacattcagtccagactgggggaacctcttgttatccattccagtttcccagcacactgcccattctctagccagtaaggcctctcaccatcctgcaaagctctgtgctccaaggatctaaccagcttcaagcctcagctcagctaccaccatctccaggaagtcctccaggcctgattcgagcactggccttagtgagatccctggctcagagtccctaatgctgattgctccggctcacatcgcttagcactttcttatctttttttttgagacagagtctcgctcttgtcgcccaggctggagtgcaatggtgcaatctccacaacctctgcagtgctcactgcaacttccacctcccgggttccagtgattctcctgcctcagcctcccgagtagctgggattacaggtgtgcgccaccatgcccggctaattttgtatttttagtagagacgggatttctctatattggtcaggctggtctcgaactcccgacctcaggttatctgcccacctcggcctcccaaagtgctgggattacaggcgtgcgccaccacgcccggctaatttttgtatttttagtagagacggggtttcaccatgttggccaggctgctttgaactcctgacctcaagtgatctgtccgcctcggcctcccaaagtgctgggattacaggcgtgagcgacccgcccggccgatatcgtgttgttttatagtgtttacctgcacagtgtttcatgccagttgtcatttcttctctgccagactctcaactccttagaggcacgagggagaataacaaaggcttccgtgataggatgccagacattgtcctctctgctttgctaacagtatctcatttagcctccggcaacctgctgagttcttagccatttttatcctgtttcatgcttccccaagacttcccagaggtcacacaacacatctgtcttgacgcctcagcctgtgttctttgccagaagcgcccaatgccagggcctggggcatgagacctcaggttggggcccaggcctctgcatgtctgaaaagctcctcggcttactccctccgctcgggggaccagcctttcaccatggtggttctcccttccccgcaacacccagctaggcaccgagcaggtggaaccctgggaaatgctgctttgtgattggttggagtcaggggtggctatgaagatgctgctttgtgattggttggagttgggggtggctatgaagagacgaagtgctctagggctctgggtgtctggatccagcactggggatgccccggagagtcctggagcagggaggatccaagcaggaggtggagctgggtgttaggagggcagaagggccatcagaaggggatactggagacatccaactggtggcctctctctccgcccagccagagctcaaggctttgcctcaccccgagaagataaatcactggggtatcacggggtcccccagcccccgtgccatgatggacatgcacattttgatttggcaggtccggagctcagattctgcatttcctttgtttgcttgtttgttgtttttgagacagagtctggctctgtcacccaggctggagtgcagtggcgcgatctcagctctcactgcagcctctgcctcccagttcaagcgattctcctgcctcagcctcccaagtagctgggactacaggcgcgtgccaccatgcccagctaatgtttctgtatttttagtagagacagggttacaccatgttggccaggctggtctcaaactcctgacctcaggtgatccgcccgcctcggcctcccaaagtgctgggattacaggcgtgagcccctgcgcccggcctggattctgcatttctagcaagtcccaggtgaggcccgcgctgcccacactggatgggaaggaccaggcgcctgcagcatctgccctccaagccttcgtagctccctccttcctgcaggataaactctaaactccttagcacaacgtgggagccttctcagagactgggtccaacccatctccagccgcagcctcccctcctggccccactgccacacccccgggcctccggccacactgagcctctcccggtttcccaggatacaacactcgcccattcatagtgtggtgccttttgcacgtgctgttcctctgcttggggatgctgttggtctttctcagccaggtgaagaggacgctgaatgtcacctgcttgagtatcaggaccggggactgggcactggacctagactcttggccctggagagaagccctgcatggggccgcagcctgcccccgtccctgctcacagaaaagctcagccttgcagccgcgtggagtcagacgacttgcctgtcctgctttgaacgtgtggtgttcctaccacctttgagtaaaaatagagctgagaatgaccgaagtgaaactccaccttgggctctgggagagcagaggtgggaccacgctggggagggtgggtgcggacactccgggggcgggggctgaggccatctgcgtgggctctgggagagcggaggtggggaccgcgctggggagggtgggtgcggacactccggggggtgggagctgaggtcatctgcgtgggctctggggagggggccctgtgagccgggccaagctgccaggcactgggggtctacgccctggactcagagagaccatggcaccctcaaggctgctctcacttgaaaattttcgttttggggctggacatggtggcccacgcctgtaatcccagtactttgggaggctgaggcaggaggatcacctgaggtcatgagttcgagaccagcttgcctaacatggtgaaaccccgtctctactaaaatatacaaaaattagctgggcgtggtggtggatgcctgtaatcccagctactcgggaggctgaggcaggagaatcacttgaacccgggaggcggaggttgcagtgagctgagatcacaccattgcactccagcctgggcaacaagagcacaacttcgtctcagaaaaaagaaaaaaagaaagttttcactctgggctgtggaactatttcaggacttcctgaggggtttcctctggagcttcctgagtttcctcctggacattttgtctccaggtcccagcgccaggcaggggtggctcccggaagggctgtgggtgccaccctggctgactgcagccctctcttgcacctcctcccggccatccacccgcaggaggtcttcccccagcactggcttgtgaggagctccctctgcccgggagaaaatggctcctccgggtcacaggctcccctccagggactgaggggcatttttggattgtgggaaggcgctccagggcccggttctgtggccccaggcctgttgctcggctgggtggaggcacctctgcaggccgggagcttggtctttgaacacctgcttagcctatgacctccagcaagttatttatgctctagtgagctgtgtttttctcacctttagaatgggaacaatcttaccaaccacactgaaagcactgctgagtttttcagcaaataaaaataaggatgccccgttaaattagaattttagatgaacaatgaataatttttaaatataagtatatcccatatggctgggcatattgggaggccaggaggatcacttgaggccaggagctcgagaccagcctgggcaacatagagagaacttgtctgtaataaaaatacaaaaaattagctgggagtggtggcagacacctgtagtcccagctcctacggaggctgaggtgggaggatggcttgagctggggaagtcgaggcttcagtgagctgagatcatgcctctgcactccagcctgggcaacagagtgagaccctgtctcaaaaaaagaaaagtaagtatatcccatacaaaacttaggacatagtagactgaaagctagtctgttgctcacccgacgttcatgttcactgggcgtcttgcattttatctgtagaccgaaagcttgtctgttgctcacctgacgttcatgttcactgggagtcttgcagtttatctggggtccctgagtctggattcagtgctgtgtgtgacactttgccagggtcccacctagatgctccgacatccatgttcactgggcgtcttgcagtttatctggggtccctgcgtctggattcagtgctgtgtgtgacactttgccagggtcccacctagatgctccgacatccatgttcactgggcgtcttgcagtttatctggggtccctgcgtctggattcagtgctgtgtgtgacactttgccagggtccgtcctacctagatcctccgacatccatgttcactgggcgtcttgcagtttatctggggcccctgcgtctggattcagtgctgtgtgtgacactttgccagggtcccacctggatgctccgacatccatgttcactgggcgtcttgcagtttatctggggtccctgcgtctggattcagtgctgtgtgtgacactttgccagggtcccacctagatgctccgacatccatgttcactgggcgtcttgcagtttatctggggcccctgcgtctggattcagtgctgtgtgtgacacttcgccagggtcccacctagatgctccgacatccatgttcactgggcgtcttgcagtttatctggggtccctgcgtctggattcagtgctgtgtgtgacactttgccagggtcccacctagatgctccgacatccatgttcactgggcgtcttgcagtttatctggggcccctgcgtctggattcagtgctgtgtgtgacactttgccagggtcccacctagatgctccgacatccatgttcactgggcgtcttgcagtttatctggggtccctgcgtctggattcagtgctgtgtgtgacactttgccagggtcccacctggatgctccgacatccatgttcactgggcgtcttgcagtttatctggggtccctgcgtctggattcagtgctgtgtgtgacactttgccagggtcccacctggatgctccgacatccatgttcactgggcgtcttgcagtttatctggggcccctgcgtctggattcagtgctgtgtgtgacacttcgccagggtcccacctggatgcgtcttgctcatcttgtgacttgcttctctcttttgtgccaccccctggctcctagaggccaagctgaagaaaagtttctatggaattgtcacagaaacattgagattttgcttttacagggtcgatacagagtcgacacaaaaaatcacgatgcgattgatgcagagtggccagtgataatagctaacgttagcctagcgcttgctgtgtgtcctacactgttgcaggcactttgtctgtattaactcccttattcttcacaaagtctatgaagaagatacttatcatctccagtttacaggagagaacagagaggcacaaattaatggagcaaaagattaatgttcatgttcttttttttgagattgagtctcgctctgtcgcccaggctggagtgcaatggcaggatctcggctcactgcaacctccaccttctgggttcaagggattcttttgcctcagcctcctgagtagctgggactacaggcacccagcaccaagcccagctaatttttgtatttttattagagacggggtttcaccatgttggccaggctggcctcaaactcctgacctcgtgatccacctgcctcagcctcccaaagtgctgggatgacaggtgtgagccactgtgcttggcctagcctttcaaagtgctgggatgacaggtgtgagccggggtgcttggcctagcctttcaaagtgctgggatgacaggtgtgagccactgtgcttggcctagcctttcaaagtgctgggatgagaggtgtgagccacatccattagggcccgtcaggaagcagatgccacactcaggctgaggagtgcggggagagctatgacggaaatgtgggcagggtgagggcagggtctgtgtcctagacctggaggcagaggccatgtggtgagggcttctgggcaggagcgtgcacagcccgggtggcccacagtggggagctgggggtaccacatcccagcctcatgcccttgtcttcctctcatctcctgctggggtggaagagaggatggagaagcagggagaggggatccggaggggcccacgccaggaaaccaggctgtgtctaggtgcagctgttcttgccgagtctctcctgtctgcaaagtgagggtgataaacgcctgtcccacgtatgtcctggggctgttgtaaaaatcagctgagaagctggatgctggcgacgtgtgttcacggcgctgttctctgccagagtaagggataattgttgctgttgataaacactcactgggtcctcaccacgaactgagtcttttcacatcctcagttctgctgggagtctctaacctctggaggatgtgtcggcaaaggaaagagaaattgcaacattgcagagcctggattcgaacccagcgtccccatgtaaagtccgtgcagcactgggagagtcacttaatgagcctccgcagtgaaatgcatctcccgggctggtttggggctcccaggggaatgggtgctatgattaccattagctagtggtgtagcgggtgggagaggacctaacaggtgccttcggcccggctgtaaaaggagtgacttctggccgggcgctgtggctcacacctgtcatcccagcactgtgggaggtcgaggcgggtggatcacctgaggtcaggagtttgagaccagcctggccaacatggtgaaaccctgtctctactaaaaatacaaaaattagctgggtgtggtggtacacgcctgtaatcctagctactagagaagttgaggcaggagaattgtttgaaccctggaggcggagattgcaatgagccaagatcatgccagtgcactccagcctgggctacagagtgagacctcatctcaaaaaaaaaaaaaaaaatagtgactttgaccgggcacggtggctcacacctgttatcctagcactttgggaggcagagatgggaggattgctcgagactaagagttcaagaccagtccgggcaacatatcaagaccctgtctctacaaaaaaaattttaaaaaattagccaggtgtggtggaatgcccctagagtctaagctacttgggaggctgaggtgggaggatcatgtgagcccaggagtttgagcttacagtgagctgtgatcacattctgcactctggcctgggcaaaggaatgagaccttgtcttaaaaaaaaaaaagactggacttgtgggtgacggggatttccaacaaaaccttcccaggataggtgctgggaaggagatgagactcagaaaaaaaaaaaagactggacttgtgggtgacggggatttccgacaaaaccttcccaggataggtgctgggaaggagatgagactcagacaccccagccttgtatccctgagaagggatggtgtccttggaacgggaatccacatagatatttagcaggcagggcggtccagcgacacctgcccgcttccctcagaaggcaccgtctgcagcactcgtacaggtggcggggccagagagcaaggctcgatggagtgacgttgcctccaccgcacgggcgtcccaccttgggagatttccgtatcgctgaagttccctttgtggagcgtggcctctgtgaaaagtgttaataattcacggtagaataggttctcagatgcgccacgtctgtcctcccccacttcttcaacagagaatggcaacacctccattaacctgaatgtgagctcctcgggggtggccctggctgagtcatctgcgccgcctccctccccagagcctcgtacgcgctcggcgtctggctgtcgtgtgaactcagctccacagggcagacatttggtctgtttgctgctccgtcgtacccctggcacctggaacagtgcctgaaccatgagaagtgtttggtgagtgaatgaatgaatgaaaaatgaatgaacggacattcactgggattcagttctccttagagtcagagagacgtaggtgtcaatgctggttgcatgaagctgttacatctttgagcctgtttcctcatctgaatttggggtgtaattcctactgactgtacagttgcagagctgacatttcatgaactttgcttaaataatgtgtgagtgcctggcccataagaggctgtgttagtccttttgtgtgtgtgtgtgtgtgtgtgtgtggtttttttttgttattgttttttgtttttgagacagagtcttgctctgtcgcctaggctggagtgcagtggtgtaatctcagctcactgcagcctccacctcctgggttcaagcaattcttgaaccttgtaccagagaggagaggtacagcggccctagaccccagggctctgctcctattggtgtaagtgtttcctcctgcgccctacctccctgtctccaggcagggcctgctgtgggtccctctcctctcagccccaagggacctgttccctccagaaggcacctccccaagcggcggcagcgtcacgtgtgaggcctgcagttcagggccagcatccctcatccctcgccgagatcaggccctggaggggctcccacaggtctgactcaaaggcacaggtccctgggcctccctcctcagcatcgtggacccacgaccaaggacgtggaagggattctgaagattaatggtcgtaagtgtcactggcttttactgagtgcttcctgtgtgtgagtactgcgttcctacttctcctgtgtgtgagtaccgcatacttcccttgtgcgtgagtaccgcattcctgcttctcctgtgtgtgagtaccgcattcttacttctcctgtgtgtgagtaccgcatacttcccttgtgcgtgagtaccgcattcttacttctcatgtgtgtgagtaccgcattcttacttctcccgtgtgtgagtaccgcattcctacttctcccgtgtgtgagtaccgcattcctacttctcctgtgtgtgagtaccgcatacttcccttgtgcgtgagtactgcattcttacttcccttgtgtgtgagtaccgcattcttacctctcccgtgtgtgagtaccgcattcctacttctcccgtgtgtgagtaccgcattcttacttctcctgtgtgtgagtaccgcatacttcccttgtgcgtgagtactgcattcttacttcccttgtgtgtgagtaccgcattcttacctctcccgtgtgtgagtaccgcattcctacttctcccgtgtgtgagtaccgcattcttacttctcctgtatgtgagtaccgcattcttctcttgtgtatgagtactgcattcctacttctcttggactcctgagagttccatgactaagacagtagtttaatatagttggtttcctttgtcatcctgcatagtttagttttacgcatttcaaaacattcttcagagaaaggtcccttggcttcaccaggctgctgtgggtccaaggcacgaaagcatgaagagtctctgctcatcgccagaggactgtgagtcccaaacaggctccctgtagtctgaacaggcttcagccttctctgggtaatcctaggctgtggttacaacggtggctttggctgcactgggaggcaggagatctgggtttttattctacctccgccactcccatgccagccctctgtgtcctcagctgtgaaatgtaagggttggactagccctacgcacttttgattccttttttttttttaagacagagtcttgctctgtcacccaggctggagtgcagtggcacggtcttggctcattgcaacttccaactcccaggttcaagcaattctcctacctcagcctcccgagtagctgggactacaggtgcccaccatcacgcctggctaatttttgtatttttagtacagacaaggtttcatcatgttggccaagctggtcttgaactcctgacctcaggcgatctgcctgtctcggcctcccaaagtgctgggattacaggtgtgagccaccgcacccagccattttctgtgttatatgtgaaatgtagcaatatgcaaaacagcacatacaatgtctgggtttggtttactaaagactaacgagacggctgggcgcggtggttcacgcctgtaatcccagcagtctgggaggccgaggcggctggattgcctgagtccaggagtttgagaccagcctgggcaacatggcgaaactccatctctactttaaaaaaaataaataaatacaaatttaaaaaaagaataaaaagaagaagaattacattgtaagcatgttcctgtgagctgcccttttctggttaaatttatgtttttaggttcatcttcgctcctgcctgtagctctaaactgtgcaccgtcaaagctgcctggaattccattgcaggaataaatggcggcttactcaggggtggtcacgctccttccacctgttggaagagaatccatagtggaaaatcatttcatgctgcaacgcgacacacatacgtacatctgcacacacacatatacccatgcacgcttgaaatgagcctcataaagtaatacctgcccttattaggcgagataatccttttcaatccattctagaaggtgacctaccaaactgcacgatcccttcctaggctgacctgcagcatgaatgatacggggctgagtgcaccccatcgtgggtctgcctgggtgcgcctgaggttctgtgcctggcaggcaggctcaggtcatggtcctgctgatcccaccaggctgtccgcacgcattggcgtgagagcggtgtgcctgccggttcctttccttcatctgccgggattgttggcttccccctgttccgctgggcgtgttccagcagcggctcttcccttgtagttgctgcttctcatggcctgtggcctgagggaccagccccctaggcatgttagaactgtgtgcactgaggtcgggcgcggtggctcacgcctgtaatcccagcactttgggaggccgaggcaggcagatcacatgaggtcaggagttcgagaccagcctggccaacatggtgagaccctgtctctattaaaaatataaaaattagccgggcgtggtggcgcacacctgtaatcccagctatttgggaggctgaggcaggagaattacttgaacccgggaggtggaggttgcagtgagctaaggttgcacctttgcactccagcctgggcgacagagtgagacttcatctcaaaaaaaaaaaaaaaaaaagtaatgtgcgctgtagcacgactgacttagtagcaagagagggtagtgtctgagaccagactgcccgggttccaagctttgccactcagcagctgtgtgaccttgggccagtcatctgacctatctgagcttcggtttcctcatccgtaaaattgagataatattagtgcctgcctcctggcgcggtgtgaggctgcggtgagttaacttatcgtatgtgtgtgtggactgttgttattactgagcctgcctgtgcgtcagagcctgacattgatctaattctttgctggtatccctggacacagtggctgtgttgaaatgagctcaaaaccctcggctaaaaggaggttggaggtggacggaagagccacttctcaggctgcctgtattcagatcccagcctcaccattaagtaactacgtgactatgagcaagttagtccatctccctgtgcctcagtttactcctctatgaaatggggatagtagtggaactcactattcaccaagtaattgttaagaggattacataagataatgcacataaagctttttttttttctttttgagacagagtctctctctgtcacccaggctggagtgcagtggcacgatctccactcactgcaacctccgcctcccgggttcaggtgattctcctgcctcaacctcccaagtagctgggattgtaggtgtgcgccaccacgtctggctaatttttgtatttttagtagagacgagttttcaccacgttggccaggctggtcttgaactcctggcgtcaggtgatccttccacctcggcctcccgaagtgctggcattgcaggcgtgagccaccacagcatttagctctgccgtctacccggctacccagccaggaactcaggagaggccttttttttttcttcacatgaaaagaggtttattttctcactggacactgtcgcccatgtgaagggagcagccacctggccccaggttccctctcaacaaaggctcagtcctcagaatggctcctcatgagccccctgcagccggaggcctaggctcttccccacagcatgtgccccttagatacccgtctgccctctggtgtaggctggtgggcatgggtgtctgaatttgggtccccacagcacccccattgaggatcacagtgttggagttgaacctggggccacctgggtaccaggacactgtgctccacggtgagcacctctcctgtccctcgatggccagcaggatctggtcacccacctacctgccaccctatccttttttttttttttttttttgagacggaatttcgctcttttgcccaggctggagtgcaatggcgcaatctcggctcactgcaacctccgcctcctggattttcctgcctcagcctcccgagtagctgggattacaggcacctgccaccatgcctggctaatttttgtagttttagtagagacagggttttactatgttggttaggctggtctcaaactcctgaccttgtgatctgcccgcctcggcctcccaaagtgctgggattgcaggtgtgagccactgcggccggcctagatgtctttttatcgttgagttgtaagatttttaaaatatagtctagatatgttttcttcccctctgcacattgtcttttcactttcttgatggggtcctttgaagcaaagaagtgttcattgatgacgtgcggttcccccgtgctctctgttgcttgtgcttctggtgtcgtatgtaagaatcctttgccaagtccaagaccatgaagatctacccccaggttttcttctacatgttgtttagctttagctgttacatttaggtctttgatccatttagagttattttttgaatatggtagaaagtaaaagttcaacttttacatgtggcaatctggttgtcccagcaccatttggtgaaaagattcttctttccccatgaagggtcttggtgcccttgttgacaatccgtcgaccatagatatgtgggttcctttctggactcactcaacgtgactccgtggatctgtgtgtctggaaagatgcccccagcctgacagtttaccttctttgcccatctgctccagtcatcctggaggctcccatagtacacattgctgggacatcccagagctgaacaccatctctcaagtggcctcagagctaatcacttcccacaggcatcgaggcgaccacagagagggcccagtgtgactggctggcccccagggcgcccgggaagggatctgcagatccctcctcctggcacagcgtcctggcaggaggcacggtcccagagcaggccctgtttgtgctgaggccccgccaggattgggtggatgccttggtgagggccaggtaggagggaacaaatgcagggtgggaagtggctgctggaatggggaagggagcggggcctgcaggagggaagcattcttggcactagtggcatcgtcaccaggacaccggccttgggagggcgagcactacatccatgggtaggcgccggagccctgaggacacggcattgccaagctcttgtcctgtggcttccttccctgtgtccgcagtgtgtggggggtgggcgggcaggcaggacgaggtgacccccatcctttctgtgtgctcgttccatgaaattgggggatgtggatgcttgaacgggctctcagctagtgtgccttccgtgcagaggaggtaacactccccagggcagccagacacccttgtggagtgggatggaaagctgggaggaaggggctggccggcaccatggagatattttggtttgcaggaggattctgggctttatgagcactttaatgcaaccagggcaggcagcaccacgggacgggaactgtaagctgcacctgttgaattctgaaggtccgggctgcccgtgggccccgggaagtgggggtgcccagcttgtggggtgcaggcggggaggggaccgtgtggtggtggagacgccatggtacagcctgtctcccgatcccccaggtcccctgaggccttagagatgaatctcccagaagtggcagccgcggcagggacaccaggatcatgaaggacctgggaggtgaacccgctgctcagttcctggccctcgtcccttagacccagtcctcggagcagaactgggggaagctgagatttctgtgggctgcgtgcccacctcctccctcttcgttggtcctcccacgcgcccgcccccgagtgggagcagagccatgtgagctgagttggagctgctcgctgccgagaattgcatcagccccgcctggcaggctggagcgggagcctgttgctatggtgaccaccaggcttcaaaccagtgagaaggatgagatggttgccgggcgaggttttctcaccatgtgatgcgtgtgacaggctgacaggttcggtagacctggacccagccctcccgtaggtgtgcctggacccccagccctcccgcaggtgtgcctggacccccagccctcccgcaggtgtgcctggacccccagccctcccgtaggtgtgcctggacccccagccctcccgcaggtgtgcctggacccccagccctcccgcaggtgtgcctgggtccccagccctcccgtaggtgtgcctggacccccagccctcccgcaggtgtgcctgggtccccagccctcccgcaggtgtgcctggacccccagccctcccgcaggtgtgcctgggtccccagccctccccgcaggtgtgcctggacccccagccctcccgtaggtgtgcctggacccccagccctcccgcaggtgtgcctggacccccagccctcccgcaggtgtgcctggacccccagccctcccgcaggtgtgcctggatccccagccctcccgcaggtgtgccatctgctggggggcatgatgggcactgtcccaaaagccatctgggcattggccaggctggggggtatgactgagggacacagggggccacgccaggcccatgtagtgtcagggggccttccttggtccttctgcctagttgtgggggaaggggtatggtggggatttgaccaagtgcacctgatgatggggcaagaaaggggtccagactggtccccatctcccagaacagagggcggctctggatcacagctgattaaacctgcccaggctgtgtcaaaaattttttttttaacggagtttcactcttgttgctcaggctggagtgcaatggtgcaatctcggctcattggttcaggcgattctcctgcctcagcccaagtagctgggactacaggcgtgcaccaccatgcctggctaattttgtattgtcagtagagacaggtttcactgtgttggccaggctggtctcaaactcctgacctcatgtgatccacccaccttggcctcccaaagtgctgggattacaggcatgacccaccgcgcccggcctgtgtcagaattttttttgttaaccacgtgacaaagctcatcatcttgctaaagataacagagcgcttggccaagccagtgcaatgcctgggttcagatctcctctctcatcttttgcctacaacgggaaaggaggtaaaaagtctgtgttccaggtgtgctgagcacttgttgtgtgccgggagttgtagtagacactgtcctgtctttttttttttttgagacagagtttcactcttgttctccaggctggagtgcagtggcgcgatctcggctcactgtaacttccacctcctggactcaagtgattcttctgcttcagcctcccgagtagctgagattacaggcacgcaccaccacgcccggctaattttttgtatttttagtagagatggggtttccccatgttgaccaggctggtctcaaactcctgacctcaggtgatccacccacctcagcctcccaaagtgctgggattacaggcatcagccaccagcccagcctgtcctgtctttttttttttttttttgagacagagtctcgctctgtagcccaggctggagcgcagtggcgcgatctcggctcactgcaagctctaggttcacgccattctcctgcctcagcctcccgagtagatgggactacaggcacctgccaccacacctagctaacttttttgtatttttagtagagacggggtttccccgtgttaaccaggatggtctcgatttcctgacctcgtgatccacctgctttggcctcccaaagtgctgggactacaggtgctcaccaccacgcctggctaacttttttgtatttttagtagaggcggggtttccccgtgttagccaggatggtctcgatctcctgacctcgtgatccacctgcttcggcctctcaaagtgctgggactacaggcgctcatcaccacgcccggctaacttttttgtatttttagtagagacggagtttcctcgtgttagccgggatggatgtcctgtctttctattgtatcctctccctcacttggggaggaggcagtgatgttcctgttttgcagaagagccggatcgggcagccagagagttgaagtgacctgcccaaaaagggttcaacctaaatccttgggcttcctgtccagggctctgtaggatgtcagccatccccagaatcaggcattctcaggatgtcctgtgaagaaacacacttctccatcccctgctggaaaaaccatgacaatctctccgcagggaagaacgcggctttgaggtggggagtggctgaccgaggccctttgtggtttctaaatggcagaatgagagaggtgggggcgttgagggtgtcacgcccaggaagcagttggggagggcagggctggacactgaccaagcctagcctgggtgcaggaactgagcttgggatttttgcttggggccctctagggattaggatgaattgtcagatgagttctcagcagacagggctttagggaactggtccagggaaataagacgtagagccagaggggaaccagggcctctgtgagagcctggcagtcatgagatctgacttgctgagcttctgaggtgtggtaataggaactaatcctctcttcggtgtgctttagatgtttactcgtttcatcctcacagaaaccctgtgaacttgggtgctactgttactccatgttgaaggtaaaacagaggcacagagaggttatgtgacttgcccaaggtcacacagctggtaaggggtggagcctgtgattcagacccagtcagtctggctgcagagcatgagctctgaatcaaatgttctcctgcctccattcttaccttttagaaagatgacagcaagttgcatacgtgacctcctcacccccaggagtgtgtgtgtgcacatgtgtatatatatgcacacatacgcgcaccagtagctcagcaagggagggaggctcaggaatgggctcgtgggcctctgtgtgttgatggctgggtttgcagaacctagggagtccggcgtctgtgtgcgtgatgctcctcccttcgtccctccctgctcgcgtggttcccagtgggtggggtgccctgttgcctctggtttagagccgtgcaggatgttaccacagaccgtgtaccaggagtgttcacccaaacttgtgaagggccctggactcccaggaaggagctcagatctaggactgggagtggacggcggccgccggaggagtgagagggggcagtgcgcttgccatgcccggggcccgtcctcctgggcctctctcggcgcttgggcaacctgtgtattgcccacacgtgtgccgctgcttgcagctcctggccaccaccctcctctttgtgtctggacgaatctgactgctctgagcacctcttcagagtggaatcatacaggacagtgtctaccgcaactcccagcacacagcaagtgctcagcacacccggaacacagacttcttacctcctttcccattgtgggcaaaagatgagagaggagatctgagtgcagacatcgcgctggcttggccaagtgctctgttatctttagcaagatgaagagctttgtcaggtgggtaacaaaaaaaattctgacacaggccgggcgcggtggctcacgtctgtaatctcagcgctttgagaagtgtgtcagcccttgagaagacaccgggcaagctggccttcctctcggtgtctctcccaggccgggactatggggagaaatcataacaacagggacaacagcagtgacaacgtcagtgacgacaataacagccactaacgttataccacgtgccaggccctgttcttagaacttcgcctggactaactcattcaactgtcacaaaagctgcatgggatgatgttgttatgttattatcttcatttgacaaatgaggacactaaagcacagagagatgaagcaacttgccccaggacacacagctaaaactgggagtggaattcggagagcctggctcctggcatttggagctgacaggtgcccggcaacccctacctatggccgagctgagctcgtcttgtgccagggagttggcggcaaaacagaaatgagctctgggccgggcacagtgcctcacgcctgtaaccccagcactttgagaggctaaggtgggtagatcacctgaggtcaggagttcgagaccagctggccaacatggtgaaaccccatctctactaaaaatacaaaaattagctgggtgtggtggtgcatgcctgtaatcccacctactcgggaggctgagacaggagaatctcttgaacccgggaggtggaagttgctgagatcacaccaccgcactccagcctgggtgacagagtgagattctgtctcaaaaaaaaaaaaaaaaactaaaaccagaaatgaattctggaggtgggatcttcctttgtaattcagaaggtgactcccaacccctcttcagaagctgggtgggctccaggcctggttcagccccctggcctcctgtcgatacccatgggggggtctctgtccctggtattactcctttcctgtctactttttttttaaatttagattttattctatttttttaaattatggcaaaataggccgggcgctaggtagctcacgcctgtaatcccagcactttgggaggccgaggtgggtggaccacgaggtcaggagatcgagaccatcccggctaacacggtgaaaccccgtctctactaaaaatacaaaaaaatttagccaggcatggtggcaggcacctgtcgtcccagctacttgggaggctgaggcaggagaatggcgtgaacccaggaggcggagcttgcagtgagccgagatggcgccactgcactccagcctgggtgacagagtgagactctgtctcaaaaaaaacaaaaacaaaaacaaaaaacaaaagaaaatcatggcaaaatacacatgcctaaaattttccatccagtgtacgcatcagtggcccgaggcacgttcacactctggtgcggccatcagcaccgtcatctccggaactctcacctggctaaactgagactccgcatctgtgaaaccagcgcaccagggaccggcttcgtggaagacactttttccacggaccggggaagggtggggagcgctttcgggatggaactgcgatccctcgcacgcgcagatcacgacagggctcacgctcctacgagaacctaatgccgctgctgctcggatgggaagtggggttcagggggtgacgcttgctcacccaccactcacctccggctgtgcatcctggttcccaacaggccacggactggtgccggtccatgcccgggggggctggggacccctgtattgaacaacagctccccgtttctccagcccccagctcctggccaccaccctcctactttctgacttgatgaatctaactgctctaagcacctcatccgagtggaatcatgtggtatttgcctttctgtgaccagcttctttcacgtagcctaatgcccccaaggttcatcgatgtcagaattggcctgtgtcggaatataagccgaataatatccgttttatgtaaaggccgcgttttgtgtatccattcatccacccatagacacttgaggtgtttctgttttttggcaagtgtcaataatgctcttaggaatgcgggtatttccccgacaacctttgggcttacttcactcatcagcagcaagcaggccatccttgaagcttaccgtggggtgggcccattgaccagcctggggagagtgggtgggtcattgaccagcctggggccatcatgctggctgggaaggcgtggccctcaggtgccagcttctacccaacactaagccgttggtgctcctggcacttacttacttgctggaagacattccaccttgctttcccgtctttccccagaagagggtgctgggtttctgcttctctcctgaatgggaaaagggcggctgcagcttgccatgaggctggcgtgggtggggttaggagaaaggactgtcaggtgctgtgttgggaagtgtgtgtggagcttccgtgaggctggggttggccttctgagcatacatggaagggctgagtgggagcagggtgttagggtagccggtcatgccgtagaaccaaattaatgctgaaggccgggcgtggtagctcacactaatcccggcactttgggaggctgaggcgggtgggtcacctgaggtcaggagtttgagaccagcctggccaacattgggaaatcccatctctactaaaaatataaaaattagctgagtgtggtagtgggtgactgtaatcccagctactcaggaggctgaggcaggagactcacttgaactcaggaggcagaggttgcagtgagccaagattgtgccactgcactccaggctgggcgacagagtgagactctgtgtcaaaaaaaaaaaaaacaaccaaaaccccccacaaattactgctgaaatcctcatcacttaacacaagcaagctgctgcttgctcacagtggtcctggtagacggggggctctgctccccgtggtcatgccgggacccagcctgatggagactgcaccatttggaatatgtggcctccaagggtcacagagggaggagaaagggagaaagagctgtgtgtaatttttcactgttcagccgtgaaatgatacttgtcatgtccacttacagtttgttagccaggactgagcacctggccctgcccagggactgccaagtggccagacagtacggccttccatgtgcccagaaagacaggaggatggggatattgctgggcactggtcgtgttgaccacatagtggcaggtggcttatgtgaaggatgaaggcccttgagcctgctctgtggccagggcagtggtgtcatggtggcagtggtggcagtggcggcagtggtgtcatgtagcaatggtggcagtggtggcagtggtggcctggtggcagtggtgtcgtgtggcagtggtggcctggtggcagtggtggcatggtggcagtggtggcctggtggcagtggtgtcatgtggcagtggtggcagtggtgtcgtgtggcaatggtggcagtagtggcagtggtggcatggtggcagtggtgtcgtgtggcagtggtggcctggtggcagtggtggcatgtggcagtggtggcatgtggcagtggtggcagtggtgtcatgtggcagtggtggcatggtggcaggtgtctgggcactgaagggacttgggtgtaactgacttctaggggaagtggcagaatcatggtcatcttcatgtgccccgcactgtgctgagctgtttacagacgtcatctcatggaatccccacaacaatcctatcattccgtttcacctttggggaagccagagctcaggaccacagcctccaagtgatggctgtgcttgctggtaggagggtgcttatggcagcagagaggccgggggctgaatggagtgtgggggccagaggtggtggggccacaaggatgtgatgtgtgtgtgtgtgtgtgtgtgtgtgtgtgtgtgtgtctccatgtgcctgcgtggatagaaacaagcagagacaagctggctgggcttttgcccttccccagctccgcgcacacctagctttgcaccactctggaggaatggtgacgtcgaatgtccaaggaagaggctaacctgggcacgtcctcttacctgccctccttgaatgacacaagacattggaagtggaagtcacagtcaccggtgctctggagctgggagtggggagaaggaggtgacttttgaggcactctgtgacagcccagttcaacagtagaattatgtttaaggcccaggaaggctctgggtggagagccagcattttgagccgaaggccagtgaacgtggccacccagcagcactgggcagaggtgcggctgcttctgcaggtgtatgtgtgaaggggtgcaagtggacgccttgggcgacttctgcggacaggggcaggagcccggagctgcgtggctctgggattgaagggcaccctggggtggaaggcaggggtcgtgcatcctggtcctggctgctgccaccctgcagggctgctttgagagtcttgctggcctctctggacctggcattacttgtctgttctctgaattgcctcttcctacttctcagcactagattgtcatttaatttttcataaataccctaaggacttacaaagccatagatgggaggggggctccgaggaggccatcccaggcaggtggtgagcaccgttggattgaaaggtcctcccaggtcatcgcctcctggccacccgccttctgcagctctggggctgagtggcatttcccacagggaaagacaggaggaagagcagagccttaaatcaaatcagcccaggattattacttgttatcaattcttgaggaggttcggaggggaagcaggaagtaggctgaagctgttaactctaataagggttagaactcctatgggatttgtcagaaggacttcctggcccccagaccctaaataattgaattggttgttatgggaagagatgaggaggattattaggagatcgtatcactcagccagcagttactgagcattggctctgcgtgagtcctgtcctgggcgccacaaataacaggcagtgagcagaagagggccaccacctcgcggggaagacagaatataccgataacccaaacgaactcagacttgctttctttgtagaggatttattttctttctttttttcctttatttttatttatttattttttttgagacagagtctcactctgtcacccaggctggagtgccgtggcaccatctggcctactgcaacctccacctcctgggttcaagtgattctcctgccacagcctcccgagtagctggaattacaggggcccgccacacacccagctaatttttgtatttttagcagagatagggtttcaccatgttggtctcaaactcctgacctcaggtgatctgcccgccccggcctcccaaagtgctgggattacaggcagaagccactgcacccagccctaatttttgtatttttagtagagacggggcttcaccatgttgaccaggctggtctcgaactcctgacctcaggtgatccacccacctcagcctcccaaagtgctgggattgcaggcgtgagccactgagcctggcccctgcccctttttttttttttgcctgattgactgaacgcgttattgtttgtgaaatgctctttttatctggtatctcttgtcactccacaggggcagccctgtgaactgcgcagggcagctgtgtcttgcccattttacagataaggaagtggcggcacctagagattaggtctggacgcgggacccagatctgcctcctggccccatgcccacctcgttgaatcccgttgcctttccatgggcgactcgtaacggagctgggggtgctggagtctgtgcccgcccctgcatctggtgtgtgatagcttaggagatgtttgttgagtggctgttgcttgcgtacacatgccgtcagctttcgtcgtatcatggcaaggttatacggcccgtctgcaatatgattcctctatgttcggtgggcacataactgtctttcctacagagagatgaggaattttagttccctctgccaaggtggggggattttgtcaaatcgcaggaaacaatggccttggtgcaaagagtagctttaatctgtggctcagctgtttctcagccaggtggccttggatgagactcagaagcctcagttttcccccgtgtcaaagggggccattcatagctactttgacaacctccctgggctgtggggatgaaatgagatcctggccgtgggctcaccgtgtaaaacactgcgcagataatactcagcatgtcccatccatccccaagagctggagactggtgaagccacatgcgcttctctgcccagggctgctggccaccctgacaccctgggcctcagcctctgcccttgatgtccaagaactatgattcctttgtctcaggctgtggagccctgagcttctccaggcggccacttctccaggcggctacggtctctgcctccctcttccaaggatcttggaggtggatgattggatttcatctccatggcaaccagagaggccataacacccgcccatggtggggcctcgagtctgttcccagcagtggaggcagagccggagcaaacaactcctgcaacagcagctgtcccccaggaatgagctgtcccccaggagcgagctgtcccccaggagcgagctgccccccaggagcgagctgccccccaggaatgagctgccccccaggagcgagctgtcccccaggaatgagctgtcccccaggagcgagctgccccccaggagcgagctgtcccccaggaatgagctgtcccccaggagcgagctgccccccaggagtgagctgtcccccaggaatgagctgtcccccaggagcgagctgccccccaggagcgagctgtcccccaggagcgagctgtcccccaggaatgagctgtcccccaggagcgagctgccccccaggagcgagctgtcccccaggaatgagctgtcccccaggagcgagctgccccccaggagcgagctgtcccccaggaatgagctgtcccccaggagcgagctgccccccaggagcgagctgtcccccaggaatgagctgtcccccaggagcgagctgccccccaggagcgagctgccccccaggaatgagctgtcccccaggagcgagctgtccccaggaatgagctgtcccccaggagcgagctgtcccccaggagtgagcttcctcccaggagtgagctgccccacagcctctgcccggcctccagttgccgctttgctgggctaatgaggggctccaggcctcggggtgagggtggcgctgtctgtgctcccagtggctgctacaggccaggccgagggtcctgagtgaatgagacaggggccgacccccacccacccctgcctgtctgtggttcacaatcagagcaaagccctttccgtccgtcttgtcttctcttccccagcgaatcccacagtccccaagactgaggacaagccctgcctcttccgggcagccttccctgtgctggctgaattgatcacgcgcctggctgatggcttcataggctgcttcagagtattttttttttttttttgagatggagtttcgctcttatcgcccaggctggagtgcaatggtgtgatctcagctcactgcaacatccgcctcccgggttcaagcgattctcctgcctcagccccccgagtagctgggattacagacatctgtcaccatacccggctaatttttatatttttagtagagacggggtttctctatgttggccaggctggtctcgaactctcgacttcaggtgatccgcctgcctcggcctcccaaagtgctgggatgacaggcgtgagccactgtgcccagcaagagtcttagttccatttggttgtaaagacgctcacttcagtgtccctgtctgaacctggcggctcttggccttcctatacattagagtcacctggggagcttttaacaggcctgatgcccaggccattccataccaattcagtagcaatccctggggtaggagccagagagcttcccaactccccagggattccagtgtgcagtgaagattggaacagttatcttaggattcaagtcatgaactggccgggcgcagtggctcacacctgtaatcccagcactttgggaggccgaggcaggtggatcacctgaggtcaggagtttgagaccatcctggctaacatggtgaaaccctacctctactaaaaatacaaaattatccgggcgtggtggcgggcacctgtaatcccagctactcaggagactgaggcaggagaattgcttgaaccggggaggtggaggttgcagtgagccaagattgtgccattgtactctagcgtgggagacagagcaagactctgtctccaaaaaaaaaaagaatttaagtcgtaactagtccaccagcctgtgctgaatggaggctgactgatgaacagcagagttagctgacaaagcttgctgtagtcttaactcactgcaaattgccaaagccctggtttgttttttaagggctgggaggtccctaagggttcttggtactcaggaaggagagcaggggaataatgataatagctgccgttttgttagcgccagctttgggtgccttgcatagcatatatttcctcattgtaacctcgcaaaagcttcatgaggtatagatcttgtttttatcctcattttagagatgagaaaactgaggctctgaatggctaagtagcttgcccaaggtcacatggctaaggtcacattcccgaagtgctaatctcaggaatggaacccgagtgtgattccaaagcctctgcccttgaccactgagctgtcctggctccccaacctctgctccatcaatcaaagaatggggggccctgagaaggaggtggcttgtcccgtgggaaagatgctggtttccaggattcctccccttggagccaggccctgactgaggggctcccgatggtattaaatatctcctggatcagctggggtcacctggaccctgaaggtgtctactttcccgttgcctacgacacccactcggcttcagctgagctttcccaaggacccttctgccctgatactgtgcccagttctttaacctacatcatgttatttaatgtcattttcacaaccaccctgtgacatggtatcgttatcctcatcttgtttctttgagacagtctcactctgtcacccaggctggagtgctgtggtgcgatctcagctcactgcaacctctgcctcccagtgcaatagaagactggccgggcgcggtggctcacacttgtcatctcagcactttgggaagccgaggtgggcggatcacttgaggtcaggagttcgagaccagcctggccaacatggtgaaaccccatctctactaaaaatacaaaaattagccgggcatggtggcgggtgcctgtgatcccagctacttgggaggctgagacaggagaattgcttgaacctgggaggcggaggttgcagtgagctgagatcccaccactgcactccagcctgggtgacagattgagacttcgtctccaaaaataaataaatcaataaaataaagtgcagtagaagacagtgtccttattgttgtaggtgaggtggtagattttgtatctgagccaccatccctgctgaaattgccccggacaggctgatctggtacaggtggcacctgggaagtggcagcctcgcttccgctggccagttccctggttcagggttgccggcctcccagatccacacctgtggtccagactctgctgtctggctgcccgttggatcttctgacagggatggccatgagtcttctcagtccagacatgtctccacctggacttagggtctgttcccccggaaccagctcccccttcctgtccatcgctcagccctccaagcccagaggaccctgctgtggccgcattttcagtcaactctcccatcgccagactttgcccttggttcccaccatggtcacctttgacaaagcacggaggggcggtttgccccgttccacatcatctcatgcaccacagtcagcttcgttttcctgaagtcacctctgaaatcaccttgccattttggcatccgtggctcccagcgtgcgtgaaatctgactattcaggatagtgttccaggccctctgcagtctgacccctccagagctcggcttcagtggtaccagtctgttcatcagggccaacctcctgcgtcctgcccccattctgcacgctgataccctgccgcaaatggaccttttccttcctcacgctctgtgactggttgtttcttccatatgaacccctcagggcagcccacacacttcgtgtttggtatttgtatgagtcctacatatgataacattttaagagcaaaggttgtggagttggatgacctgtgtccatctggtttcccacctgactgccgtgaaatcttgggcgagtaacttaactccctgcgctttcatttcctccattgtaaatgagtcataatggtacggaggcagaaatttaaaaacaaatatgtatgtatttactccaagaaaagtaacaggcaaggcaagggttaaaaagaaaaaaaaaacaggccgggcacggtggctcacgcctgtaatcccagcattttgggaggccgaggcgggtggatcacgaggtcaggagatggagaccatcttggctaacacggtgaaaccctgtctctactaaaaatacaaaaaaattagccgggcatgatggcaggcacctgtagtcccagctactcgggaggctgaggcaggagaatggcttgaacccgggaggcggagcttgcagtgagccgagatggcgccactgcactccagcctgggcgacagagcgagactccatctcaaaaaacaaaaaacaaaggaacaaaaaaaacctctttttttttctgcctagcaagctcactttaaggagttataagataacgctgtttaagaagccaaggctaaagaaatgggctccacacacccgccttttagagcaaggttgaaggaaaaaagaaagagaaattcctttactgttactcctttccctggcttcctaagcataactgtgtttacaaatgtctggatttagccagtccttgtttttcttttgacacagctacaagccacaagttatgcactatatgattaactgcttttgttttacttttgtgaagtctgcttataaaaaccccattctgtctttattcaatgctaagctttttaaatgcaaatccactgagctagtgcatacctaaaataaacagtccttcccttctccatatcggtctctccggtcctcagtttcctgcaacagtacaacttagattttaaatttttaagaagtttttcaggcagagtgtggtggctcatgcctataatcccagcactttgggaggccaaagtggaggactctttgaggccaggagttcaagaccagcccggcccacatagcaagaccctgtgtctacaaaaactttttcgaatcagccaggcatggttgtgcatgcctgtggtctcagctacttgggaggctgaggcagggggatcatctgagcccaggagtttgaggctgcaatgagctatgtttgtgccactgcactccagcctgggcaacagagcgagactctgtctctaaaaaaaacaaaaaacaaaaatcaaaaaacaaaaaaaagcttttcaagtgcaccagtcttaagcatagagcttggtgaatatttccatatgtctgcttgtgtaactaacacccagatcaagatatggaacatcttcagtgtcctggaaagttgcttcctgccccttcccagccaacactccctgtccccgtcgtccacccccagaaagccactgccatggacttctatcaccatccatttgtttcgcctgttcttgagctttgtatttaggctggtgcaaaagtagttgagagctggacgtggtgggtcacacctgtaatcccagcactttgggaggctgaggcgggtggatcacctgaggtcaggagcttgagaccaacctggccaacatgctgaaaccccatctctactaaaaaaaaaaaaaaattagccgggtgttggtggtgggcacctgtaatcccagctactcaggaggctgaggcaggagaattgcttgaacccaggaggcggaggttgcagtgagccgaaattgtgccactgctctccagcctgggtgacagagtgagaccccgtctcaaaaaaaaaaaaaaagtaattgtggtttttaccattatatattacctttgctccaacctaaagtaaatagcctcctgcggtgcaggcatacctcgctttacggcactcctgtgatgcgggcgtaccttgctttacggcactcatgtgcaggcgtacctcgctttacggcacctccatgcttagttgagcttcaaagatgctgcgttttttttcaccagttggaagtgtgtggccacctcgcattctctctgtgttacgtgttggtggttctcacgatctttcagacttttttattgttatgacacctgttacagtgatctgtgatcagcgatcctccatgttagcattgtcattgttttgggcaccacagaccggacccggcaaccttcatctatgaacgttgtgtgttctggctgttccgcccaccagcctttcccagcctctctcctctccccgctccagcctccctattccctgagacacaaaaatatccaagttagtccagtgagtaaccctacagtggcctcgaggtgtgcgtctgtcactttaaatcaaaagctagaaatggttcagtttagcccgggctcggtggctcacgcctgtaatcccagcactttgggaggccgaggcgggcagatcacgaggtcaggagttcaagaccagcctggccaacatggtgaaaccccatcgctactaaaaatagagaaattagccgggcgtggtggcgggcgcctgtaattccagctactcaggagtctgaggtgggagactcacttgaacctgggaggcagaggttgcagtgagctgagattgtgccgctgcactccagcctgggtgatagagactgtctagaaaagaaagaaagagggagagagagaaggaagagagaaagagagagagagagagaaaaaagaaatgatttagtgtagtgaggaaggcttgttgaaagccaagataggctggaagcggagcctctcctaccagttagccaaattgtgaacacacaggaaaagtgttttaaggaaattcaaagtgcttctccagtgaacacaagaatgataagggaaacagccccactgctgatatggagaaagtttgagtggtcggataaagatcaaaccagccacaacgttcccctgagccggagcccaatccagagcaaggccctcgcactctgcaagtctgtgaaggctgagagaggtgaggaagctgcagaggaaagtttgaagctggcagagatttgttcatgaggggtcaggaaagaagccgctttcataacagaaaaaggcaaagtgaagcagcaagtacggatggagaagctgcggccagttgtgcagaagatgtagcaaagactgtaaaggaaggtcaccgcactaaacatcagatttttggccaggcgcggtggctcacgcctgtaatcccagcactgtgggaggccgaggtgggtggatcacttgaggtcaggagttcaagatcagcctggcctacatggtgaaaccctgtctttactaaaaatacaaaaatcagccaggcctggtggtgcacatctgtaatcccagctactcaggaggctgaggcaagagaatcacttgaacctgggaggtggagcttgcagtgagctgagatcgcgccattgcactccagcctgggcaacagagccagactctatttcaaacaacaacaacaaaaccaaacaaaacaaaaacaaaacagatcagattttcaatgtagacaaaacagccttctattggaagaagacatatgtaggactttcatcctagaaaagggatccgtgcctggcttcgaagtttcaaaggacagaaggacaggctgactctagtgttaggggccagtgcaggggtgactttaaaccagtgctcactgaccattctgaatatcccagggactttaggagtaatgctcaaacaatggtattcttcacagaaatagaaaaaaaaaaatgctaaaatttatatggaaccaaaacaaaaataacaaaactggaagaatcacattacctgactttatttgtttattttttttgagacagagccttgctctgtcacccaggctggagtgcagtggcccaatcttgcctcactgcaacctccgcctcccgggttcaagtgaatctcctgcctcagccccccgaatagctgggattacaggcacctgccaccaagcccagctgatttttgtatttttagtagagacaggctttcaccatgttgaccaggctggtctcaaactcctgacctccggtgatctgcctgctccagcctcccacagtgctgggattacaggtgtgagacaccgcacctggcctctctgaagacttttgatgcagctttggtggaataatggtcagggctgggctccctcagctgctcttccctctctcattcccatcctcaattcttgggcagaaaataagtttatcacttaacagtcagcctctgtatcacccttgcgacaggctggagggtgtcgctccagcctgggcaacaagagtgaaactctgtctcaaaaaaaaaaaaaaaagacaaaaagaaaaagaataaaaaataaagttagcaatattcagcaatgatgtggccggcaagagcctgcagaggatcatgggccaggtcacccatcctcactgagtcctgcacggctctcggctcagctcacgaggctctcaggagcaagtccctgcctcctctccagcacggccctctccccctctgctcactctgtgttctagccctcctggctatttatagtcccctccaggggccctgctgtttcccactgggtgccactgccaagcctcctctcaccgcctgaaactctgctcctgtcccccacccgcctggcaggcacccacacagctttcaagatccaattaataacagtaataatagcagctgagatggattgggtgcttcctatgtgctaagtgccgtatgcgtgtcatccagtttaacccccgcagcggcccgtgcacttgatcctgtgtcgtcccccgtttcacacggatttgctaaacccgtatccatttagtagcagccaccctgtgccaggcactcctcggaggcacagagaggttaggaagtgccagagcgtgggctggaacctccgctgccggaccgcagggtccctgctctcagccacagcgatgaactgtcttccttagcgtggcaccaaagcctccccagccacctcccctccccgagtgttgcccacaccctccggtccgccttgccgggcctttgaggcctctgtcgtagcatctcggagatttgattgctgattggactcgcttcctctctgggctgtgaggatatcatttggaaatgtgttcattgtaagcagcagaaaacccaatatatagggacttgtatttcccatgagcaggaaatgagacaggctcttcctagtgtggctcagctgaacagcatgagggaaatggctctgttcttttatttatttaatttaatttaattaattaatttttatttttttgagagggagtcttgctctgttgccccggctggagtgcagtgctacaatctcagctcactgcaacctctgcctcctgggttcaagtgatctcctgcctcagcctcctgcgtagctgggattacaggtgtgtgcaaccatacctggctaatttttgtatttttagtacagacggggtttcatcatgttgagcaggctggtctcaaacttctgacctcaggtgatccacctgcctcagcctcccaaagtgctgggattacaggcgtgagtcaccacccggctaatttttgtagtttctgtagagatggggtttcaccatcttgcccaggctggtctcgaactcctgacctcaggtgatctgcccgccttggcctcccaaattgctgggatgacaggcatgagccacgcgcccggcctctgttctttcttgacctgttcctggtggcagcagtaaagccaccgtaactccaatcatcacccatgagttcaaggcaaaatgtctctttgtaatcatcaaagtcagggccttgccagaggtcccagcatgcttcacttgggtctcagtggccagaatggtgtagggcagccgttcctggtaatgagagaggcagagaaagcgggtatcttgcctgggactggtctgttgccacttcctagaaaacgagggtagagtaagcaaggaagaagggaagacgggtgtcgggtgtctgccagtgccctagagcgcagagaccgtacattaattttttcaaaatttccagaatcggaaggctctaatgattttgtgttgtagccttccagtcttttttctatgcacgtatgtttttacttttttcagacattgtaacatactttaattattgttattaatctctttttgcacttgataagatgctattcatcatccatatagtttttaatgctatatagcagcccatcttgtagaaaaaccataattgactcaaccagtctcataattcaggttgtttttaatatttcacacttacagacagccctgtgacttacaactttatttttatgttcatttataactagtatcatagatcataatcttattacgctgggtataaactgtaccaaccactaaaccttttgataccagttaccagattgactctagaaaagttgggccaactttttttttttttttcgagacggagttttgctcttgctgccaaggctggagagcaatgttgtgatcttggctcaccgcaacctccacctcccaggttcaagcgattatcctgcctcagccttcccaagtagctgggattataggcatgtgctaccacgcctggctaattttgtattttagtagagatggggtttctccgtgtgggtcagcctggtctcgaactcctgacctcaggtgatccgtccacttcggcctcccaaagacctggggttacaggcgtgagccactgtgcccagccaaagttgtgccagttataggcagcctccaagagtttctgtgagtacctatgccctgacagctctggatattgttattattatcttaaaatccttgccaatttgacacgaacagtgaaaactatatagaactttacattttctttcattacaaatgaggttaacattctttttaatgcattttgaatatttgtagttctcttttaaattttctgttcatttcccttacacatttagaaagttgaggttttcatcttttctcattggcttgtaaaagtgctttattggccaggtgtggtggctcacgcctgtaatcccagcactttgggaggccgaggtgggtggatcacaaggtcaggagttggagaccatcccggctaacacggtgaaaccccgtctttactaaaaatacaacaattagccaggcatggtggtgcatgcctataatcccagctactcgggaggctgagacgggagaatcgcttgaacctggcaggtggaggttgcagtgagctgagatcgtgccaatgcattccagcctgggtgacagagcgagactccatctcaaaaaaaaaaaaaaaaaaagtgctttcggtattcaagtattatcataatatgtagaatacaggaaagttcctgggagagggcacagatgaggcagatttgagggcaaaacaggatttcaccaggtggacaaggggtaaggagaggtatatatatatgtgtatgtgtgtgtgtgcgtgtctttgtgtgtgtgtgtgttcatagagacagagtctccttatgttggccaggctggtctcaaactcctgggctcaagtgatcctcctgccttggaggatgccccacatcatagtgatgggatgacaggcgtgagccaccgcgcccagcaaggagggttttctaggcacgggagcagtgtgtgcaaagaggggggagctgtgtgcgtggcaggcactgcatttggtgtgcaaagaggggggagctgtgcgcgtggcaggcactgcatttggtgtgcaaagaggggggagctgtgcgcgtggcaggcactgcatttggtgtgcaaagaggggggagctgtgcgcgtggcaggcactgcatttggtgtgcaaagggggggagctgtgcgcgtggcaggcactgcatttggtgtgcaaagggggggagctgtgcgcgtggcaggcactgcatttggtgtgcaaagaggggggagctctgcgcgtggcaggcactgcatttggtgtgcaaaggggggagctgtgcgcgtggcaggcactgcatttggtgtgcaaagggggagctgtgtgcgtgtcaggcactgcatttggtgtgcaaaggggggagctgtgtgcgtgtcaggcactgcatttggtgtgcaaaggggggagctgtgtgcgtggcaggcactgcatttggtgtgcaaagagggggagctgtgcgcgtggcaggcactgcatttggtgtgcaaaggggggagctgtgcgcgtggcaggcactgcatttggtgtgcaaagaggggggagctgtgcgcgtggcaggcactgcatttggtgtgcaaaggggggagctgtgtgcgtgtcaggcactgcatttggtgtgcaaaggggggagctgtgtgcgtgtcaggcactgcatttggtgtgcaaaggggggagctgtgtgcgtggcaggcactgcatttggtgtgcaaaggggggagctgtgtgcgtggcaggcactgcatttggtgtgcaaagaggggggagctgtgtgcgtggcaggcactgcatttggtgtgcaaaggggggagctgtgcgcgtggcaggcactgcatttggtgtgcaaagaggggggagctgtgcgcgtggcaggcactgcatttggtgtgcaaaggggcgagctgtgtgcgtggcaggcactgcatttggtgtgcaaaggggagagctgtgtgcgtgtcaggcgctgcatttgtggcttaatgctgccattagagattgccatgaacttgatggcttagaacagcagaaatcgatgctctcgcagtctgaagaccagaagtctgaaatcaaagtcccagcccctccccaggctgccggggcagagttcccacttactcccctctttcagtgtctggtggctccaggcattccttggttggtggcagccccagtccaaaccttgcctctgtcttctcttctgtctgtgttttccccctttctctttccatagggacacagcattggatttaggacccaccggttaatcgacaatgatctcatcttgagacccttcatttattcacatctacaaagaatgttttccaaataaggtcacattcccaggtcccaggaattagaatctggacataccttgtgggggggccactactgaacccaccgcagggagctagaaggagtccgatgtcacagggcaggagaataggaccctggagaggtggagcaggtgcagaccacaaagggccttgagctgaggagcggggctgtgtccctaagtgaatggggggcaacacggtctgatttgtgacccggctgctgtggggagggtgctggaattgtccttgtaagagttggtgagggtggggaggagcggggatgcctcacagtgcaggagatgaggggcgggaatgtggaggcatctagaatggctcccaggttccctacgtgtgtggtctttgggaaaaggctgcgtttgaggctcctaaaggtggagatgcccaggagtctgcagacctgacttcttccgggagcaggaacacaattcgggagaggaaggtgatgcgaggttgatggaagctggcgagtaccagtccctgccaccaccaccattttatcatgaacaattgtaagcacacagaaaagttgaaagaattcacagtgaacacccattcacctgctgtctaacgttcccagtgatgatttttatgcgcttgctttatcacacagctgtccatctttccatccctctgaacatcatcattccatcttggtttttttgttgttggttggttggttgtttcgagacagagtctcactctgtcacccaggctggcgtgcaatggtgcaatctcagctcatcacaacccccacctcccgggttcaagcagttctcctgcctcagcctcccaagttgctgggattacaggcacccgccatcgcacccagctaatttttgtatttttagtagagagggggtttcaccatgttggccaggctgttcttgaactcctaacctcgtgatccacctgcctcggcctcccaaagtgctgggattacaggtgtgagccaccgcgttcagcccatcttattttttatgtatttcggagtaagttgcagagagttgtacacttcactccagcatgtcactcactggagcccaacatttgctgaagtgcatgaatctttttttgttcttgtttttgtttttgtttttttgagacggagtcttgatctgtcgcccagtctggagtgcagtgtcgcgatctcagctcactgcaagccccgcctcctgggtccacaccattcttctgcctcagcctcctaagtagctgggacaacaggcgccaaccaccacgcctggctaatttttttgtagccagtatggcttcaccatattggccagtatggtcttgatctcctgacctcagatgatccgcccgcctcggcctcccacagtgctgggattacaggcgtgagcccctgtgcctggccctgtcatctaggttttaagcccctcgtgcattaggtatttgtcctaatgctctccctccccttgccctccaccctccaacaggccccagtgtgtgacgttcccctccatgggaacagcaatttttaagggatgggtagagaaagaagatttcaccaaggagcctgagaaggacggtgacagtcagaggaaaagcaccgaagcggggacgtcagggaagatcacctgggtcagttaccttaggtttgactgcagataatagaaaaaccaagtaacagaggctcaaattgcatttggcactttttctttcttttatgtaaaaacgccccgaggtagaccttcctggggtgggctccactgtgccctcagtgacctggactcccagcttgtgaaaacgtcccgaggtagaccttcctggggtgggctccactgtgccctcagtgacctggactcccagcttgtgaaaacgtcccgaggtagaccttcctggggtgggctccactgtgccctcagtgacctggactcccagctttctgctcagctgtcttcagtggtggcttctatcctcagctcacctcatggttcaggatggctgctggggctccagccatcccatcaactctccaaaccagcaacagaaggaggaacaagggcagtgtggatagtgtacctttcggctaaatcagtctcttccagcagcttcctgcaagttccacacatatccctgtaacatcttgttgtctagaacgtaatcatatggctcacaccatcaggaaaggtgtctttgaactagctgctgggtgcactgccgctccgaatacagtaggatttctgttagtcggcggggaaatggatattggctgccagcagcctttgccttgtctgccttttcttcttttttgagatctggtgcccaagccgctgtctgctcagcatacccacctgtggccgtcggagactgaagcctgtgctcagtaggtccccatcttcctcccccagggttcctgccttctccgaggattggtttccccatcttttctgtaccccttttcctggttggagtctcctgggctctcatggttttgtgggggcagaaatgaaaggggaaggccctggaaatgttcgcaggccgagccctttcgccgcccctgggcctccgcccaccagcaccctgtcctcaggccccctgcgttcagctccatggtcagccccccttaaccaggagggatatggaaggggacttctttggagtgagattcagagggaaagggagggcatttgagacctgggttctgatcctgtgatcttcggcaattgtatgtaaattgggaaaaataagaactgcctccccgcggaacatccaggctggaaggagcaggggatggcagggcccgtggtcctctgctctgatcaggatgaactgtgcatgtggggagactggcagagaccttccctaccgtcccttcccccccgttgatcttggacgatctcccaagtgtgtggggtccattcctgcgacccctgggaattggtcagtgtacaggagagtctgcttggccggctggaatctaaactgtgggcaaagccgcggtccactattgcttattttccctggactccaggcaccaacagggcagcctggagcctcctggagaggaggagggaggagggaggggccggcgggaggctgccttccatcccctcctgtgcttctccagagtgagggggtgtcaccaaacggccaggcccttcacggacccagactcaggccagctgggtgccgctgtgcctcttcctcctccccctggaaggaccagagtcatttcacatcccttcagccacagacacaagtgtcatggtctccagggcactgggccttatgtcctaggtgcgtggcctacacacatctcagtgggagggcatcctgggtcctgcccaggtacgtggcgtacacgcgtctcagtgatggggcatccctgggtcctgcccgggtgtgtggtgtacactcatctcagtgatggggcatccctgggtcctgtggttcttcatacacaaccctgtctagggaaaaaactagtccatgtcccctggcagctgaatggggcattggctcagggacgaggagaggcagccgacagaagcaggtgcagcgagcctaggggaagcgctcggctgccaaaaggccagattgggcagagtgtggccacggccaggcgtcccggtgacctgttgacaccattctccagctgctggttgcctgtgggctggtgtgttgtgacagaggagggaagagctggggcccccgtggagaacttggctggctgggacttggctgaagcctcagacctgagacagacggtgcgatcctctgctcattcattcgctccacgcactttccccgagagcctgccacaggtggggttgtgggtgctggcgtacagtgatgactcagatgctcacctcctgccccaggggctcaaggacaaaggggcaggattcactaaggtgccagggggccaggtgccatggggagggtgacctggaggaaaggatgtctgggcagatggcagggcaggctcagccagcctcccccatcacactgtgcgagatccgaagatgcctggccagggagtcccgcccggaagatacccggggaggtttaacaagcggacgccgccactgggcagtccagtgcgtaggaggctcctgctggccccaaggctgccggcacggtgatcttcgtgtctccaggacgccctgcggtgccagctcccgctggcccgcacgagtgctgaagcttacccctgctctgcgatgagtgtgagaggggtgtccaccccccgctggcggccccagcccaaggaggtccaccacagccctcgggagcaacactgccacgttctccgttgccagtcgtggtgggtcagagctggggagcaaacaggccaaggggcaggggccggtttgtgggagggtccctcctatagccatgctggtggggctggacgcaggggcctttccgaggccgccctcgtaacccttttggaaaatgtgaagccctgagctgctgacctgcacaccccgctcgctgcactggctcagcctcccctcccaaggtgggtgggctccgtgcctgggctctggagcccaagtggtgctggcagccctggggggttaatgcggctcaacttcccggtcgcctttccttccctcctcctttgaaggaagcccacactggggtgatagaaataagcaccggctccgaggagtctgctgtgagcccctgtccctgccaggcctgggcacagcctcctcgcccacgccctgctgccttgggctccgtcctccgtgcggggccttgttctgagggctgagggctcccctcccacactccagaacctgccctggacccctggagggagtgggctcagtacaaatggtacccaaggaggagggccacaggaagtgacatcgaccggccccccccacctccttattccctataaaaagcaaaatggtgactcagagaggagagttggaagcgtcctgcctcttgctcccactgttaatttttacacttggaattaggcagaaggcaaagaaaacagcagcttgaaatacgcggctgacatgctcttcatcgggtagcaacagcagagccgctcctccccgcctcccagcagccccggagcgggcagggcccggtgcctgctggctctcccccgcccctcaccaggcccaggcccccgcacagcccccgcccgggccaggcgtggatggtgcggccggggccatggctgccgggggccgccgccggcgcccactacgctaccagtccctggcagctctggtggaggattctcagtggcctttcttgttccttgtctcagacttcagctacgggacggacgagtacgacggagaggggaatgaggagcagaaggggcccccggagggctcagagaccatgccgtacatcgatgagtcgcccaccatgtccccgcagctcagcgcccgcagccagggcgggggggatggcgtctccccgactccacctgagggactggctcctggggtaggtacaccggcttttctttctgggtttggggaggggtgacgggaaggcctgggcatcgtgggccaggccctgcttgggttggtctcgagagattgggactggagacgtttggacctggccgttcttggtgcctcgtcatctcgtcctggccctggacccctctcaggctcgggcttccctccccacctgctttgccaacgctgccgcccctgtctctccccgtctactagccgtctgctccccaggcctcccagacccctccgtgcctctttcagctttcccctgttagcctgtctcctccagaggacccaggagaggaccaggctctcctcccctctgcacccaggccaggcagtggctgcatgcgtggcccgtgggctccaggtgttcagatgctgctcccgcaaagccagcctgggcctggtgctccctgtgggtgcaatgagctgcccgctccagccctcctctgttcactctggaagggaacaaactctgatggcatccacctctccttgttgacagagacaagagttctgctccagagagaagcattgtagaaggaatattaagtatgtgctctgagacaggccagggatagaaactgtggagggtttgcggtccttgtcattaacgtgttcctggcgacagggactgacgctgtctgagcgcagctcgtgtgtgcctgtcggagacacatgaacgagcaaaacagaggttctgggggttgtttgcctggagctggtgggggagaagaatccaagccggtcctctgtggggggtgtgtgttgcaggaggcggtgggagtgccccatccttgcttggtcctgctcgtccgggtgtgttttgtagggggtctccgtcctgccttctgacgtccccagaggagcagtcgctgagatgccacgggctgcctcttcttcctccaggggctagtgcccccccaccccagctgaggccgcctgaaccctcccattcttgagaaccccctgctccttccagcccccccggccaccctccaccccccacagagctctcacccctcttcacacaccggggtggctgttatagcctttggcaacaagggccttggcaacgggcttcccacttgggggaagccacattgctgccatggcaacagaggccgaggccgagtttagcggcagtccaggcgtgcacctgtgggaagggctggcggggggcaggtgggaggcaagggggccggcgagggggttggtcagtgtgttgttgacctgccctaagacgggaggcgggttagagacaagcgtctcggacctgcgggggcagggtttttgccctggttctcctggaggcattgggctcagggtacaaatagtaacccaaggaggcagagcaggtgttcagggacctgaacgggggccaaccaggggagagcaaggaggagaagactctcgctcccatctctgccttcagctctcaaaccacagcagggctcagagccccgcccggggggactcagctctcaccccactgtgagcagctgcaggaagatgctgcggaatcccggtgtggggccagggtctttgccgctgcctgtccccgcgccacctccctctttgctccctgtccctgtgccctgtccttgtcgcgtgaccaccatgactggtttccgtgtccgtcgattttccgattcctttggtgctggcaggtgccttctctcgggagacagatcacgggcgtcacgcacagatgcccccgcctggcgctccggggcttcggggcagaacttgacttggtggctgtgcgtcttgcttggtggctcacgagggactcacttggcttgaggaccttgaaatccagagatgctagagtgactgccccctaaagtgcttgtggcccccagggttgatgtttacaccatcgactagaagccacgcaaggcaggagtagggagcacttgtccagcctggggatcgtccgggcaaaggtcccatccgcggcacctgccttccctcctcagggagcgtttctgccctttctgctgggtcaccggccccacctagtggactctgcagggattgctgtttacacggggtgcctggagggagctgacgcctcttcctgagtacttggggatgttttggttaaaaacactattaataaaagaccgaggtttctgcggcttggctgtgcttatttggccaaacaggtcccctcccctaccaggcttcctgctggggccttgggaacaggggggacttctggaccaaatcagacaattgttgtagatattcagatatctggcttctggcaccgccttatcgctgggccttccacgcccaaatatgcagccaacgggaagcccaaggttgagtctttgtgttagtcagtgttctctagagaaacaaaaccaacagggtgtgtgcgttatctgtatctatatctacatacgaagaaaagtattagaaggaattgattcaggtgattatggaggcttagaggtcctaatctctgcagtcaatagctggagacccaggacagccaatattggttccagtccaagtccaaaggcctgagagctaggagagccagggatgtaaattccagctcataagccagtggactcgaggctcaggaagagccagtgtttcagtccgagtctggaggctggaggaggccaacatcccagctcacgctcaggtagtcaggcgagaggagcttcctcttattctgcctttttgttaattcaggtgttcagtggattggatgaggcccacctacactggggaggagtctttttactcagtccaccaatacacatatcaacctcatcccaaatgcctcacaaatatgtccggattaatgtttggacaagtatctggacaccttgtggcctagtcaggttggcctagaaaatgaagtgtcatactattattccttcagccacccaggatggaaagcagataagctttgcgcagatgaaaatctattactctcaggctgggcgcggtggctcacgcctggaatcccagcactctgggagactgaggcagccagattacctgaggtcaggagtttgagactagcctggccaacatggtgaaaccctgtctctactaaaaatacaaaaattagccgggcgtggtggcacatgcctgtaatcccagctactcaggaggctgaggcgggagaatcacttgaacctgggaggtggaagttgcagcgagccgagatcttgccactgcgctccagcctgggtgacaaagcgagactccatctcaagaaaataaaagaaaatctactctttagctgtgagacattgggcaagtgtcctcataccgctgagcctcagtctccttgtctctagatagctctaactcccctgaaaggtagtggggaggaggccccactgtgagcagctctcagaccacagcagggctcagagccctgccttggggactcagctcccatcccactgtgagcagctctcagaccacagcaaggctcagagccctgcctgggggactcagctcccatcccactgtgagcagctctcagaccacagcagggctcagagccctgccttggggactcagctcccatcccactgtgagcagctctcagaccacagcagggctcagagccctgcctggggggactcagctcccatcccactgtgagcagctgcaggaagatgctgcggaatttcagcatgaggggaggcctgcagcattaggcctggctcaccaaagtgcacagcccttggccaccagggcccacaagacttttctcgccaggtttagagggctggggagccaacagcattaccactgcaaagaccaagtctgatcaatatctgctgcaccatgaccgaacctgcttttgcaatcaacctcctttctgccacatggggtggccccgggtgaagccgggtctctgcggtgttggcaggacatgctcctctctccccagcacgcccttccacagccttgcactctgcctttgtcttcttttgtgtccccaagacatggatcccacagaggtattagggtgaaacctgaagccctgccccataaaccctgcccaagtccaggctgagcagggcagcacggcagggccaggcccacagaccacgggtggctccattcagcggagactgcccagtttcactctgagaagaaagggccaggactcatctcagctgacaagtgggggtgtaggttcctaaggcaggaccatggtcttacagaaaacccgcctccccacaggccacagactcctctgtctgcttgcctcttgggaagcttagtaaaaaggggctacaaggcagagagaagaactgggttttgtccccactctaccactgtctcactgtgtggcctgaggggtgtcactcatgactccccaccagagctgcagtttgctcatctgtagtgtgaagacactgagaatttcctccctcctgacctcacagggctcaaacctcacagctgttgtgaggtttctgtgagatggtgtttggcagaatgctttgtcaatgtaaaatcgaaacaggggattagactccagcctgcaggagaacccaaagataagggtggaggcgaattgaaatcctcaccattggccgggtgcggtggctcacgcctgtcatcccagcactttgggaggccgaggtgggtggatcacctgagatcagtagttcaagaccatcctggccagcatggtgaaaccccgtctctactaaaaacatacacaaaaaattagctgggtgtggtggcaggtgcctataatcccagctacttgggagactgaggcaggagaattgctagaacccagtgggggcagaggttgcagtgagctgagatcacgccattgcactccagcagccagggggacagagtgagatgccatctcaaaagaaaaagaaaaaaaggaaaaaaaaaatcatcatcattgtccctatcatcctcttcctcctcctccccctcatcacagctgcttagagaggcttgtgctgaacctttcacgtgttggtttcatttaagagccccaacaactctatgaggtaggtgctataaccatctccacattacaggtgcgaaaactggggctcggagaggtgacgtaatttgcctaagattagctgggcatggtagttcactcccataatcccatctacaaggggaactgaggcaggaggatcgcttgagcccaggagttggaggctgagaggtgctaggatcacgcctgcgaataggcattgtaccccgcctgggtgacagagcaagactccatctcttaataatagctattaatattattgtttgtccaagaccatgcagccagtggggcagcgtgttattgaaacttgggtttctatgatgccagagcctgcacagcgctgtcaggtcccgctcacacgccctcccttgtgaagctttcacacccaccccgccgctgatcctactgcagtttgggaggtgtgcacggtcacttgtggggtgcatccgccctgtgagatcaggaccttaatccctgatcatctctgtggaccccagtggaagcttcttggcacctaggggttctcaactggtatttgtggaatggaaccaagtagttctgggatgttcagtcaggaggaagggaggagcaaggaaggctcaggcaataacgctgggaagaactcaggctcagggataacgctgggaggaactcaggctcagggataacgctgggaagaactcaggctcagggataacgctgggaggaactcaggctcagggataacgctgggaggaactcaggctcagggataacgctgggaggaactcaggctcagggataacgctgggaggaactcaggctcagggataacgctggggaggaactcaggctcagggataaagctggggaggaactcaggctcagggataacgctgggaggaactcaggctcagggataacgctgggaggaactcaggctcagggataacgctgggaggaactcaggctcagggataacgctgggagaactcaggctcagggataacgctgggagaactcaggctcagggataacgctgggaggaactcaggctcagggataacgctgggaggactcaggctcagggataacgctgggaggaactcaggctcagggataacgctgggaggaactcaggctcagggataacgctggggggaactcaggctcagggataacgctggggaggactcaggctcagggataacgctggggaggactcaggctcagggataacgctgggaagaactcaggctcagggataacgctgggaggaactcaggctcagggataacgctgggagaactcaggctcagggataacgctgggagaactcaggctcagggataacgctgggaggaactcaggctcagggataacgctgggaggactcaggctcagggataacgctgggaggaactcaggctcagggataacgctgggaggaactcaggctcagggataacgctggggggaactcaggctcagggataacgctggggaggactcaggctcagggataacgctggggaggactcaggctcagggataacgctgggaagaactcaggctcagggataacgctgggaggaactcaggctcagcgataacgctggggagaactcaggctcagggataacgctgggaggaactcaggctcagggataacgctgggaggaactcaggctcagggataacgctgggaggaactcaggctcagggttaacgctgggaggactcaggctcagggataacgctgggaggaactcaggctcagggataacgctgggaggaactcaggctcagggataatgctgggaggactcaggctcagggataacgctggggagaactcaggctcagggataacgctggggaggactcaggctcagggataacgctgggaggaactcaggctcagggttaacgctggggagaactcaggctcagggataacgctggggaggaactcaggctcagggataacgctgggaggaactcaggctcagggataacgctggggggaactcaggctcagggataacgctggggaggactcaggctcagggataacgctgggaaggactcaggctcagggataacgctgggaggaactcaggctcagcgataacgctggggagaactcaggctcagggataacgctgggaggaactcaggctcagggataacgctggggagaactcaggctcagggataacgctgggaggaactcaggctcagggataacgctgggaggaactcaggctcagggttaacgctgggagggactcaggctcaggcaataacgctgggagggactcaggctcagggataacgctgggaggactcaggctcagggataacgctggggagaactcaggctcagggataacgctgggaggaactcaggctcagggttaacgctggggagaactcaggctcagggataacgctggggaggaactcgggctcagggataacgctgggaggaactcgggctcagggataacgctgggaggaactcgggctcagggataacgctgggaggaactcgggctcagggataatgctgggaggaactcgggctcagggataacgctgggaggaactcgggttcagggataatgctgggaggaactccggctcagggataacgctggggaggactcaggctcagggataacgctgggaggaactcaggctcagggataacgctgggaggaactcaggctcagggataacgctgggaggaactcaggctcagggataacgctgggaggaactcaggctcagggataacgctgggaggaactcaggctcagggataacgctggggaggactcaggctcagggataacgctgggaggaactcaggctcagggataacgctggggaggaactcaggctcagggataacgctgggaggaactcaggctcagggataacgctgggaggaactcaggctcagggataacgctgggaggaactcaggctcagggataacgctgggaggaactcaggctcagggataacgctgggaggaactcaggctcagggataacgctgggaggaactgcagcctcttcttccctttcttggtctcttcagaaggcttagggcttgggattcgaggttgctggtaggtgcgtgaagaggcggcatggcagccaggaactcctgagatggtgcctgctccactccctcctgactgctccggacctgggttgtgtggttcagggactcctcgagtttcagcctccgccccccagcagccggcccctgcatttctccccttcctggatcttgggtccctgctgcaaagagaaggacacgagctggaccctcccgtgtgccaggtgctgtgctaggagcccaggggctgccctgccacccaagtcctccagccatggggctgcccccgtttagtagatgaagacactgaggctcagggtggctcctgggcttgtcccagttgggaaggaggtaagtcggaagtaggtagactagtgccttggttgtgaccctgggtcccgtcatcgctggctcccgtcctctctggccctcctacattcacacctggctgggatcttgctcacctctgcatactgttaatcttccctgatgaaccacacctggctggcctggctcatcccacagctctcacgccctgtctgggatctccgtcttctggctagctagcagccctagagttgatgccgtaattacccccattctatagatgaggaaacggaggcacagggagactagatgacatgcccaggtcacacagttggcaagaggcagagctggggctcacatccagagtgcaggggagttttctttctgttttagtttatttgtttcactgtataaacagtgttgtgtaccggcttctcctcaacattagctttattttattttatgtaatttatttatttgagatggcgtctccctctgtcacccaggctggagtccagtggcgcaatctcggctcattgcagcctccgcctcctgggttcaagtgattctcctgcctcagcctcccaagtagctgggattacaggccaccacatccggctaattttgtatttttagtagagatggggtttcatcatgttggccaggctggtcttgaactcccaacctcaggtgatccgcccgcctcggcctcccaaagtgctgggattacaggcgtgagccacctcgcccagcctatgtattttatttttttgagacagagtctccttctgtcacccaggctggagtgcagtggtgtgatctcggctcactgcagcttccgcctcccggggttcaagtgattcttctgcctcagcctccctagtagcggggattacaggcacccgccagtacgcctggctaattttttgtatttttagtagagacggggtttcaccacgttggccaggctggtcttgatctcctgacctcaggtgatctgcccgcctcggcctcccaaagtgctgggattacaggcgtgagccactgcatctggccaacattagctttatgtagttgaactatgtatatgattttggagtgacctgtactagaacagagaggaggcagagggaggagcaaggtgatctggaaggtgacgaatccagtcccatctgtggctgcagttagtggctgcaactgccctggcacttgccctttggtgtcagttcccattggctgaagagctactgagcttcatacagtctggaggtggggcttgagtttctgccaggaaagctgggagagccagggagaagccaagaggcgggagaaagtgcttcaagccgaggacctgccgttgttaaaggcctggaagtgagaacgtgccaggccctttgagaggttactgtcaacagtgagatgggtgagtcatcagctggggccccacggctcttgtttgggctggcttggtggcttcctgctgggcatagagtgagcagtgttttagaaagagtcatctgatgtcagcaggagggatgcaggatgaatgtcctgtcacacctgtcctgaaatcctccagcaccttcccttcgcctatggggccccccttccctttgcacagctgtcaaggccttgtgtgacctgacccctggaccccctgcctacctctgtggcctcaggaccaactccgtgctagaattgtgaactctcacgagagagagattttgtcggttttgtaacaaaacttgctcattgcagtctctggtgccgagaactgtgcctggcacacagtaggtgctcagtaaatattagctgaatgaatgcatgaaccagccagactaaactcatgtcattgtgcctcacatagtctctctcctgtctgttccccagccccaccagcatctctaaccactgctttttttttttgagacggagtctctctctgtcacccaggctggagtgcagtggcgcgatctcggctcactgcaacctccgcctcctgggttcaagcgattctcctgcctcagcctcctgagtagctgggactacaggcgtccaccaccacgcctagctaatttttgtatttttagtagagacggggtttcaccgtgttagccaggatggtctcaaactcctgacctcaggtgatctgcctgcctcagcctcccaaagtgctgggattacaggtgtgagccactgcgcccggccataatttttttttttttttttgagacagagtcttgctctgtcgcccagactagagtgcagtggtgtgatctcagctcactgcaaccactgcctcccggattcaaggaattcttgtgcctcatcctccagagtagctgggattacaggcctgtgccacccctcctggttaatttttgtatttttagtagagacagggttttaccacgtagaccaggctggtcacgaactcctgaactcaagtgatctacctgcctcggcctcccaaagtgcgggattaaaggcgtgagccactgcgcccagcctaattttttttttttttttgagacagggtctttctctgtggcccagtctggaacacagtagcacaaacacagttcattgcagcctcaatatcctgacccaagcaatcctcctgcctcagcctcccaagaagccgggaccacaagagcatgccaccacactcagctaattattttttaaaatttttatagagatgaggtcttgccatgttgcccagctggtctcaaactcctgggcttgagtgatcctcctgcctcggcctcccgaactgttgggatttcaggcgtaagccactgcacccggcctatatgtatagtttattcgtggacacaaataaggaaaaatgtataactaactcttagaggctccctctgtcagagggaaccagaggagactttctctttctttattatgtgtgtctacagagttagaattgttagtgatgtaacaggaaaataaagaagttaaaatagaagtgccacgattgggaacgtagagtgggctctgagggcaccagcgggcacatctgacgcagccaacggggagtcacgggaggctccctggaggaggtgacgtttaaagtcgaatctaaaaataagcagtgggccaggtgccgtgtctcacacctgtaatcccagccctttgggaggccgaggcgggtggatcacctgaggtcaggggttcgagaccagcctggccaacatgatgaaaccccatctctactaaaaatacaaaaattagccgggcctggtggcgggttcctgtaatcccagctacttgggaggctgaggcgaaagaatgggttgaaccgaggaggcggaggttgcagtgagctgagatcatgccactgcactccagcctgggtgacagagcgagactccgtctcaaaaaaaaaaaaaaaaaaaaaaaaaatcgcaataggtgtttccatgttatcccttccagaaaagtggcacctcagctgcagagttctgacactgctcccctccccagtacggccttgcccctcccttgacactgccttgggagtcagtcaccaggtcaatctgtccctgagactgtcagctccgcgagggtaggcacggggttccctgtccatggctgcattccgatgctagcacactgcctggtgcacagcaggcggctaacaaatgcttgctgattgggtcaggcggttaacaactgcttgctgattgggtcaggcgttaacaaatgcttgctgattgggtcaggtggttaacaaatgcttgctgattgggtcaggcgttaacaaatgcttgctgattgggtcaggcgttaacaaatgcttgctgattgggtcagggaaggagggaatggagggtgggtgtgggggaagactgtggggagtcaaccattggagactgagatttagacttgatggtgtcagaaatctcagtggctgcgaaagatttcaaacagtagctaggtgtggtgtgtgcttatgcccctcaccctccatgatgctgttcagcccacttctccaagttcatcttctgtcctctagcaagcagcgcttcttaacctgccttccttcctctcttccttccttccttcctccctccctccctccctcaagacagagtctggctctgttgcccaggctggagtgcagtggtgcgatcatagctcattgcagcctccaactcttgagctcaaacgatcctcccacctcagcctcctgagtacctgagatttcaggtgcgccactgcaaccgggttgctgaagctgcttaaccctttcctttcgggccttctcttctttgcctggaaacccttccctatttccagatgctactcagaagccactgtcctgtgaagctttcactctcaggcagcgttagtgccactgtcctccatccccagggtggctggtaaacgagaacactgcctcgtgtgttcacacgtcctcaccccagacggatcgagagcctgagaacggcaagggccccgtctcccagcctcgtatgtgtgccatgccaggccttttctgggtatgaatgaatgaatgaacagacagatggacagacaagatcaggagccaaagtggggaagtacgtgtggtcgtgtgggtgtaagaggctctaaagcttggtggggtggtggctttggcaaaggaaaagaagaaccgaaggacttggtaaaagggatgtgggggttgagggaaggaagactcgtaagatggcggccgcactaacagaagtggaaacccggaaggggaagctgtttcagaaggaggaagggtcctttggtccagatgtgtggagtggaagggccgtggctgggcttccaagtgaggagacccagtggccggggcaggtgctagacctagagcccagcaagacaccagggctgcagctggcagcgggccaccactggcctggaagggagaagggctgcttctctgggggaagggagcagagggctgaggctgggcccaagcaagtgactccacatttacaggaggcgggagaatgaagggccagcctacaccagagagtggtcggggcagtgcctgcatcaacagggcagctgagggcttggagaaactctagactgcagaggccaaagagtcggagagggaggcctctggctttggaataaaccgtttgggggggcctttgaagcaggctgcttctatggagaacattaggagccaggccgaggcagatggagtgtggagctcaggtccagggctggctcagggcatttgtcagggaaggggagggaagctgtggggactggtgagtcacttcccctccaggggggcaccgagggcctgtgagtggagtctgtgtctgatggaggggcactctcattactcactggaatttccagccaccggggacagggtggagtagagaggccctggatactcagggagtcacttgtgtggggttcagggattttgggaagaagtgggcgtcagtctcaccatgccgtgtagaggtgtggggaacggggacgaggatatcctggcagacttccaagggcacctcatgtcctcttgagtggaggaaggaacacagcaggggcctgtggggttttaggcccttcttcgtgtcacctgcaggtctgactcatgtgggcagcccatgccatgcacttggagcccgccgggcgggagacagaagaacccgtggtaccaggccctgagctggcatacttgtgccctggggaatgccaggcctggtcgttcccaagccctcgccacagcctcacccgcccgcaccaaatgaggaattgtggctgaaagggcccttcagatgcgccctggctatttataacccacccaggcagggacaggggaaaaccaggggctggaaggagatgggtggggtgggggtgtgcctctgttgaaccctggtggcacagttccctgatcaaaggctgttagccctggggcccctcaagggctcaccccgcaatcccctgctctgtatttcagctctgcaacaggatggagcctctctccagggagggcagcttctctgctgccaatggaattgcatgagccccacctagagcccagagcttctgaagaattctggggggagtggggggctgtggcctgaactcgggccacaggtgtggttcatttagacggcaccatgttgttttaaaatgttaattatttgccatcgttttaaaatcaggagcattcctgttaataagccagattttagcttattttgaacagagatcaggcagccatgagcttgcgtttcctccagcagccatcggctggagtgagtggtggtttcaccctgccctacctggctcgcttcaccggctggcctcacccgcaggcctcacccgcaccctcatgggtgccgtttgcaacctttgctccatcgttgggttgtaaaagagcttttcccagggcctcctctggactcctcctcccatggaaggaggtgtatgtgcatctgggaactagggccagggggaccagaatgtggcctcactccctgcacagttgggggttctgcaaccattggagaagccaggggaagctggctgggagtgggcagggccggagatggtgcctgtcctgggttctgtgtgcactccccttgcaggatggctccctgcggtggggtggctgggggggctgcttggaggaggtgggggtgctggtctcagcagtgcctgtgagtaggtgggaggctgctcagaggaggtgggggtcctggtctctgcagcgcctgtgagtaggggggctggtctgtgagtgggggggctgctcagaggaggtgggggtgctggtgtcagtagcgtccgtgagtggggggactgctcggaggaggggggctgcttggaggagggggatcctggtccctgtgagtgggacgcccaccgctcctgtgcaggacagtggtggcgccgcgctcctgcctgggggcaggtcaggcctgtctgttgcaaagcctgactcctccagcggcggcgggacgcggctgtggcttctgggcgggccggggcctcccctccggaagggggctccggcgcatggggactccggggtggctctgggggtcgcccctgctcgccgggctcctggctcggccgcgcgcggggaatgaagatgcgtctgggaagcggcctccccgctccaccccaccccggcccggccgcggcctcctcgctcctcctccgccgcagaagcctccgccagccgcggccccgcaaccccagaggacgggcggctccacctcgcgacgcgcgtttcctgtgtgttcggagcgagcgcgagcccgagccccggagcccgggaagggcgggccctgcggggccgggcgggacacggaggagggcgctgggctgctgtgcggcgggttcgcctccgccacgggccgggcacggcgtcaggggctgcccgggccttgctccccctttcgccgggcgaggacgcgcgaggcggcggcggcggcggcggagcgggctggactaggtccgggatgcagtcccgggtcgggagccccaggccgggcgcgcgggtgtagacctgccccccctcccgcccgcctcctccctcctccctcctcccgccgccgctgcgtggaccccgcttcctgtctgccctccgcgggctccggctgccatggaggaggaagaggaggcgataggcttgctggacaaggttctggaggacgaagatgtgtttctcctggaggagtgcgagctgggaaccccgaccagccccggctcagggtcccccttcctggtggctgtgaaggtgggagcgtgacacgccctgggcgctggggggggccgggccggcgctgccgaaggtgcgcgggagaaatggctgatgcgggcgcagagcgcgcggccgggtggaagccctcggcggagggtcccggccccggcagctgttcccgggggagaggggcgggcctgcctccccgaccggtgtcctcggggcagtggtggccgccccctccaggccagcccagctcagggctccggcggctgtgccaggagtcacctggcgcgcctgtcagcccgagcctcgccgcctccctggagcgggtgggcaggaatcccccgtttccacggcaaccgcaagagaggggccaccctcttcccagccaggagacagggacttggtgtctccgagctgaggcaagagggtgtttgcaaagggcaagagccagaggtcactgagcttccttgaaggaaaagcactgggtcagctgaaggggggagggaacagctggcttggaggctgcagccaggtgggcaggtgcccttcccgaggcgggacaggcagggagcatctgctgggccctggcccacccgctctggggctgacggcgttctctgcagcagtgacccgtcctgtaggagaggttggctcccggtggaactggagggcagtggtggccagaatcccttgaggagcggggcggccccggaaccacgccggctctgtgagtctggcccggcacaccacagcggtcttcctttttctctcctggacacacctctcagagcttccacctcagccttttgctcagctgctctctggttctgtgtcgagaagggaggcccagtgaggatgcgtttcggggagtttgcagactgctaggcgaggctgcctaaccgagtgcccatcggcggggcctagaaggcatgtgcagccagcattgctggggacgggaggctgtccctgaacctctctgggcctccctgcccctcacagaagatggggatcacagtcctgccccacccactctacagtgtggctctgaggaggagccaatggaggtaaaaatagatgcagaaccacgggagatggctgatgtgtgagtatgggtggagcggtggctgcaggcctgggtggggagtggagctgtagggaggctggcagtggctggcaccccaccctgtcttctctgatctggtgctggcgtagggccgtgggggtaagtcacgtctccccgtgggctcagggaggcctctgcacttagggtctgaccagcctccccactaggaacagggtgggaaagtctgctcctgagccaggagtcaggctgggagtagcaatgctgggatgggaggtgtgtggccctcatgggcctcctctgggaagcccccagcacagatgtgggcccactcagaggctgcctcctggacctccccttctgctggaccccggcgtatgcctcagctaagcccgtatttcattctgctcagatgctcagaactctagacatttgcctccgcaattatatcccattctcctggaggaccaggaccatgtcatattcattgctgaacactgcacagtgcttggtgtggggctggtgcctgtgagagtctgcacaatgtgtgaggcccgctggggcccacgaagggtgcaccaggttcccagcctcgctccatctcagaggtgtcctgctgtgtacggcggtggcccacggatgccaagagagcctgagcacgtgtcacacctgaaaacgctgctcctcctgggtccccgtgagcaccgggatggtgtcttcccctctactttgctgccagcatgggggaaggagacctttctcgaatgccggggagttccaggctccctgctccatcctgaacacctctagaattcctccctcctctaccggcattggcctcagagggagaagacaagcaggtggccacagagcggtgggaagaaagctcctggattcattcaacaaacactctcaggttaggtgctcttcagagcaccctgcctggcactgtagagatgacaagaggaacaaggcgtgatcttccctcacaaggcgttcagagcaaggggcaggtacagggagtaggaatagagtacggaagtaggcagggtgggccagatgcggtggcacacgcctgtattcccagcactttgggaggctgaggtgggcggatcacctgaggtcaggagttcgagatcagcctgaccaatatagtgaaaccacatctctactaaaaatacaaaaattagccgggcgtagtggtgggcgtctgtaatcccagctactcaggaggctgaggcaggagaatcgcttgaacctgggaggcagaggttgcagcgagccaagatcatgccactgcattccagcctgggcgacagggtgagactcagtctcaaaaaaaaaaaaaaaaaaaagactgtgagaagagtactgataaaagggcaccaaattcaggggagaagggaccacttctagtggagttggggatggcctggatgcgtgcatgtgtgtgtgtgtgcaggccaagggtcatttctggatgatacactcctgtcctgggctgcagaggttcttggcacacccttccctggcagctagtaggaatccaaggcaattctctttgctattactttactttaggggtacttaccttaagcagcagttgcgttgtgagcatgtgcccaagtgccaggcccataaatcaatcctgtttccagtgtcatttccaagacgcttcatcttcctggggggcagaggtaaagttggctgcagttttctccaaagctatagctggagtttgctgcatatctcagcccagacttacctttgaagagttattgatctgtaaaactggtaatgcaaataaaatactgatagcagcgtcatgttgcatttgtaaaatggcttacacttgccaaaaatgtttcatgccattctatttaaagataggtagggttgtgacgggggcgttgtagaaggtgctattttaaggaacttatttgtcaggaataaaaacccttttgtaatgcagattaaccctttaggtatcattctgtgccatttttttttttcttttgagacagagtctcactctgtcacccaggctggagtgcgatggcacaatcatggctctctgtggcctccacctcccagactcaatcagtcctcccacctcagcctccccctcactacaggcacatgccaccacgttgggctaatttttatatttttgtagagacagggtttcaccatgttgcccatgctagtctgtaactcctgggctcaagcaatctgcccctcttggcctcccaaagtgctgggattacaggagtgagccactgagcccagcccaattctgtgccagtttttaatggatcatctgaaacatctctatttctgtttcacctgcccaggtctcttgtgcctgcacatcatgcctgtatcccccatttggatgtttttctaagtgcgggccccacgtggtgatttgagaaatgatcggtggcacctcgatctatattttgcattttaatggttaagtatatattttaatatatattagaaaaaatatgacctgtacatttttcttacgatttcaaatacgtgtagggtaagactgctttttacaagtcagttcttgggcgcagtggctcatgcctgtaatcccagcactttgggagactgggcgcggtggatcatgaggtcaggagttcaagaccagcctggccaacatggtgaaaccctgtctctactaaaaacacaaaaagtatctgggcgtggtggcgtgcacctgtaatcccaactactcaggaggctgaagcaggagaatcacttgaacccgggagatggaggttgcagtgagccaagatcctgccactgcactccagcctgggtgacacagtgagactctgtctcaaaaaaaaaaaaaaaaaaaaaaagttactgtaaagaacaatattgagtaaagaatagtgcaggtggtggtatgtgagtatggcaaaattttaagggtgggatatgaacaaccaaagtttcaaaacattgcctgtgccctatggtgcctgcctaagacctcagacagcaatagggagcccagaatacggggatccacccttcaggagagaggggccactggaatttggtctttgtcccccagcagttgacccgtcttctctgttctaaattctgccaaggaagcagctgaaagagacttcctcagcgcctagcgctgggagaggagagggtctctcgatgcctctacactgcctcagctgtcctgagactgagatgggccagttgtcctgaggttgatgcttggtgtgggtataagccccaggcacggccacccccacccccaggcccagtggcatctactctgagcagatcctgctgggtactcctggcagccagctgtggcccgtgaactgacttctaccgtctgtgaagcctcagaccctcgctgcatgccctatagccttgagtcgcagccagagagccagccctgcttgttgtcttggaggccagtgctactggagagattgtgtctttgcttggcctggaaccagatgtttggaggctttatttagcctctcaactctgtggaggaccaggcctgagctggccacgccttatctctagacattgttcctaccagagtgacctgacgtctttggtttggcggcttcaagctgccacactgtcagcctagcagattgtgcaggatgctgaggataaacgaacccaccaggactgcatttcacaagttctggctgggaggaagtgaggacaggcagcttcccggtgctggagacaggtaggcagcgtggcagaggctgtgggacctggaactctttagagaactcgctccggagcattctaggcacgtgggcacctctccttcaccttcgtattcccagtgcctggctcccggtgggaatgggtgagtgagtggtgagcctggtttttgatgagacaagagacgccctgcaaagactgaagaaacaatgtgaatttcctcatggctctaaactgggaattgtggagtctgaggaaagctggaaaagatgggagatggaacaggccttcctttggtggtgactgagcaacgggtctcctgttagccaagtgcaccgaggctaatttcccatccgtacgctctccaacgcctttgctccaatctcagccaaaactgcagcgtgaacggggcccagagcaggactcttggggctgactgttgcctcttgagggagggtcttcctgagttgtcttcccatcagaaccagcctttcaagagtggactatgaatggaagtcttgaggggaggatcttgcagaaatgggcgattacagggcttccagggtctatgctcgtgccaggggggatgaagcttgtttgtggctggggctgcaaatccctttcttccccccatcctagtccaaccagctctacagttacagctcacggtgtggcatttgctaaaccctcaggcaaaaccttggttggcagggaacaggagggagtgctagcccccagcacaggggatgagttcccatttgtcaaggctgggaagcagcaggaagacccctgagggtctgacctggaggggctggagctgggggctgttccaggctctgatcttgtcccccggggctacgtgtgctggaggctgtgcaggcctctggcagtcccgactctcggtgcctcaggaagatgataacacctgccaggttttgagactccggtgaattgaaccacaaagatagctaagctcagttcctggaatttgtgaagccgccaataagtaactattgcccttgcctgaagcgtggggtctgtcttgcttttctaatgctgctgaaacaaatcgccacaaacttaagggcttaaaaccacacaaatttattctcttatacagaaatctaaaaaggatctcggcccggctccatggctcacacctgtaatcccagcactttgggaggccgaggcgggcgcatcacctgaggtcaggagtttgagacgagcctggccaacatggtgaaaccccatctctactaaaaatacaaaaattagtgggtgtgatggtggacgcctgtaatcccaggtactcgggaggctgaggcaggagaatcgcttgaacctgggaggcagaggttgcagtgagctgagatcatgccattgcactccagccctgggcgacagagggagactttgtctcaataagtaaatacataaataaatagattaattaaaataaaaaggatctccagggctgcattgcttctggaagctctagggcaagcttttccagcctgcggccatacggcccaggactgctttgaatgtggcccgacacaaatttgtaaactcttaaaacattatatatttttcttttagttcatctgctgtcgttagtgttattgtattttatgtgtggcccaagacagtcgtcttcttccagtgtggctcaggggagccaaaagatcggaagcccctgctctaggggagtgagttcattttattgccatttccagcttccaaaggctctctgcattccttagctcgtggccccatcctctgtcttcaaacctaccagtgtagcatcttccaagcagtccctcaccactaccctgtctccccggccctctcactccccttctgtggccacgatgcctcagggaaagatggcattttaggcagcaggtaaagaacgaaccgaaagctagagacctttgaagatgaggaggctggttctcctgcgtgtgggggagactgagcgatgtcctggctgtgggaaagactggaagggtagggacgggcatccgggccactgcaggtggctcataaaggatatggtgggccccatgtcccagtctagggccgaatctttacttgttttttaaatgtctttccggcagggtgcggtggctcacacctgtaatcccagcactttgggaggccaaggcgggcggatcacgaggtcaggagatcgagaccatcctggctaacacggtgaaatcccggctctactaaaaatacaaaaagttagctgggcgtggtggcgggagcctgtagtcccagctactcgggaggctgaggcaggagaatggcgtgaacccgggaggcggagcttgcagtgagccgagatcgcgccactgcactctagcctgggcgacagagcgagactccgtctctaaaaaaaaaaaaaaaagaaaaaataaatgtctttcccactagagtctaagccacttgagaacaggggccactgtctgtttcccatggtatctatagggcctggtggacattcagtaaatatttattgaatgaataaataaatggacacatagcccagtggaatccccaagtactcgcgttttgcggtattcatactcggtccttggcaagcatcgggcaaggtggcactcttaggagttgaatccagctctggtgtgtgggacaggcaggaggagaggaagagagggaggaaaagtcggttcgagaacccaggtggaaaatagattgagggaagcaaaacgagatgttacaggaggaatatgggtgattgtcttttccttttatatttctgcatgttttgtatattttttataataatatctgacttttatcccctatgaaagtgtcgcttaaaataaaaggaaaggggaaaggggggccgggcgcggtggctcacgcctgtaatcccagcactttgggaggctgaggcggacggatcacctgaggtcaggagttctataccagcctggccaacatggtgaaaccccatctctactaaaaatacaaaaaaaattagtctggcataatggctgggcatggtggctcacacctgtaatcccagcactttgggaggctgaggtgggtggatcacctgaggtcaggagttctatatcagcctggccaacatggtgaaaccccatctctactaaaaatacaaaaattatctgggcatggtggcaggtgcctgtaatcccagctactcgggaggctgaggcaggggaatcactggaacccgggaggcggaggttgcagtgagccgagattgtgccactttacttcagcctaggtgacagagcgagacttcgtctcaaaaaaaaaataaaggtcgggggggaagggcagggaagcagaccgtccacgcagggttttggcctccttgctcatgagctgttggctgtgctttgcgtttgtgcaggtggaagcagggaaaggcctggagatgaggaagctggttctctcggggttcttggccagcgaagagatctacattaaccagctggaagccctgttgctggtgagtacagtccctgctctggggccttccggtccccccgcccgtgttgggtgatgtcatgctctgaagctgcttttggagttggagaggaaaggggaccgtacccgtccctccctgtggacagagtctgcagctggtctgcttctggctgggcatcgggcagcccgggtcattgccagaaagggcctgtgcctctcagctccagctctcaaaaggcaggagaagcacacccggcttagagatggcaaacacacctgtcacccacgaccctggcatagggcatcgtgaacccatcatggtgctctgcctgcctgggcgggggccgagcgccttctccacgctgtgctctgggcagtcattcccaatcaatccagttaagaagtctctgccgtcttgtgtccaagtccttctacctccctgggtgagggaaccgttagtgccatcctgaggccccgtgtcaggaaatatgaggtgggaggctgtgttctttttttttttttttttttttttaagacggagctttgctcttgtcacccaggctggagtgcagtggtgcgatctcggctcactgcaacctctgcctcccgggttcaagtgattctcctgcctcagcctcccgagtggctggaattgcacgtgcacgccaccagtcctggctaatttttgtatttagtagagacaggattttatcatgttggccaggctggtttccaactcctgacctcaggtgatctgcccgccttggcctcccaaagtgctgggattacaggcatgagccactgcgcccggcctgtctgtgttcttttgagaagcggcacagctctgaggcatcaggccaagctcagccctcggtaacatgcctcagttcccctcccagatggaggcatcgttgtgagagtctgattgggaggggaatatgaaaatgttttcggaagataaaagtactacacagatgtgaggtggttttgccttggaagaaagtgctccttagatgtgtctggatgttatgcagagtgatcgtggcgtgtcaatctttcttttgggtattttgcagcctgagacataaggtaattgtcagaaaagggagacgcagaagtgtggatctgtggaagctcattcttaacaagaattctaagatgcacatttaagtacttgccatgacgtgaggtgttgtcacacgtcaaccctgagatgctgtcagtgtcccaggggacttgacatttatgttacccaggaatgactgtgtaaatgtgcaggtgcaggccgggcgccgtggctcagtgcctgtaatcccagcactttgggagccccaggtgggcagatcacttgaggacaggagttcgagaccagcctggccaatgtggtgaaaccttgtctctgctagaaatgcaaaaaaaagccaggcgtggtggtgcatacctgtaatcccagttactcaggaggctgaggcatgagaattgcttgaatctgggggcgaaggtcgtagtgagctgagagtgcgccactgtactccagactggacgacggaagtgaaattcctcaaaaaaaaaggctgggtgcagtggctgacacctgtaatcccagcactttgggaggccgaggtgggtggatcacctgaggtcaggagttcgagaccagcctggccaacatggtgaagccccatctctactaaaaatacaaaaaattagctgggcgtggtggcgggcccctgtaatcccagctactcaggaggctgaggcaggagaatcgcttgaacccgggaggtggaggttgcagtgagccgagtttgcaccattgcactccagccggggcaacaagagtgaaactctgaatgtgcagctgttttgccacacgccaggctgagtacgtcccatctctccaggagtttatctgtgtgtacggagctgttttccaagtgaggggcagtgtggcaggtagctgagggtcctggtctggggccagagctagggcaagacttggccctgccattaagagcaggcgtattgcactgtttctcaaactgtgcctctcagcccatcagtgctttgggttgtgaaatcagtacagtgggttgtgaaaccagtacagtgggttgaaccagcatttttaaaccaatgaaaaaatgtcagcatgcatcatacacgggaaagataagtgagggaactttcggtttgttgtctgtctgtgtgcctgtatatatatgtaattgccgggcccatggtgtcttacacctgttgtgggtttgaaaactgctggctttggccgggcgccgtgtctcaagcctgtaatcccagcactttgggaggctgaggtgggcggatcacaaggtcaggagatccagaccatccttggccaacacggtgaaaccccgtctctactaaaaaagtacaaaaaaaattagccgggcgtggtggcgagcacctgtagtcccagccactcgggaggctgaggcaggagaatggcgtcaacctgggaggcggagcttgcagtgagcagagattgcgccactgcactccagcctgggcgacacagtgagactccatcacaaaaaaaaaaaaaaagaaaagaaaactgctggctttgggcaagccctacataaattccttgagcctccatttctggatctgaagatgagagggatgccattctttctctctctttccatggggttgagaagatcgggagatgctttcgggacctcatacagcgttgagttacttaagacactcaactgttagtggaagaaaggaggacaggcaaagagacaacccgtcagacattcgtgaaacacgtcttccaaaccgtgaattgctgtccaaaaaggaacatagttgtcattactaacagggtgtgtatttgaaaggagttcagacagaggatctagactgcctggccgtactggctccaggctttcagcaggtgaatgagctatcgtgcctcagtttttccatctgcaaactgggtatacaaatagtatgcttttcatggggtcgttgtgaggattaaaggaatttatacacagagttctttttttttttttttttttgagacggagtcttgctctgttgcccaggctggagtgcagtggcacaatctcggctcattataacctccgcctcctgggttcaagccattctcctgtgtcagcttcccaagtagctgagattacaggcacccaccaccacgcccagctaatttttgtatttttagtagagatgagatttcaccatgttggccaggctggtcttgaactcctgacctcaagtgatccgcccgcctcggcctcccaaagtgctgggattacagatgtgagccactgtgtccggcacataaagctcttagaacacagcctgagtgttcgttgacactgttaatttctctattgctgggagaggagacaggttagggcttcgtggtttctgccacaacacacccgttccctgaaggagggagtggcgcctgtccccatcagacacggagcccttagatcccacctgccacccacgagcctcttcctctgggccaagaccaagagcccctccctgctctgcctttctaacagctcatgccccaaaggcagaatctgtggggcaggggcccccttcctgatatgcctggcgcaggttccccccttccccagctgtctcctcccggggcaggttccccccttccccggctctctcctccccgggcaggttccccccttccccagctctctcccggggcaggtttccccccttccccagctgtctcctcctggggcaggttcccccattccccagctctctcctggggcaggtttccccccttccccagctctctcctcccggggcaggttcccccacttcccccagctctctccacccggggcaggttccccccttccccagctctctcctcccggggcaggttcccccccttccccagctctctcctcccggggcgggttccccaccttcccccagctctctcctcctgggcccctgcttggctctttcttgagcagagaccagagggagcaaaggaagaactcgctgggaggccaggtctgtggtaggagggctcaggaagaggagtaggaccctccacagccacagcctcagaagaaaacctcagagtgaaagaatcacacccttcctcctctcctccctgagctgggaacccctgcaccctccccacccctcagctaggaggaagctaaaccttctgctcttcggggtggcctcgcaaaggtgccagcttgaaggagaagaaattcgttccctccatgctcgctttcccactcctgaccccattcccaccgctctgccccagcctgtttgctttcatctgaacacttcctgatatgcaaagggctgggtgtgtgtacctaaaaccatgtgcacacacggggcagacgagcctccacacagaagcctccgtcctggcctctggggtgcttgtgggggtcatcttctggggccctcctgcttcctggtgggctctgattacaggaaaagcctgggagcctgggccgaagtagggggtgaaggaaaaaagatgaagccaactgcattgaaattctggatctccttgacactgggaactgagcttgggaactgtgtcttgctacgctggggccacagggtgaggccactccccagagcccctcccaccgctggccacgactggccctcctggggtggactcctggccacgctgcatcgcaggctctttatctataaaacaggtgaatgaggccttcctccctgggctccagtgacgagtgactcgggtggcatggcagcaagcatgccaggccttctggggcaggaggtggaggaagtgggtacatttctttcccttatttcgaaaggccggtcgctgggggacagagctgacaaacggctatgtgaagtcccactggcaagtgagaaccggcccaggcccgtcttcctgagaagcagctggtatgggagccagggttgaagtcactcacgggtcctctccgagaactcgagtggtgaaatggagagccggggcctgcccttgtccctgcagcaggactggggaggagggggtgcctgagtggtgtgctagcgctttggcagaatggctgtgccgtgccgaagctcagtgtgggtcaccttgcctttcagtccaccctcctgcccctgagcccatacgcaggacttcaccagagacaaataacggcctcgagggtcctggccagccaagggcacacacccagccctgtcccctccccgcgagtgaaatcaggagtaacagccaaggtccccatcgtgtcatgagaaccatctgatgccccaagcgcaggccccgtccttgtgactggctgtgggtgagcgtccatttcttccccttttgcagacggggtgggaagttgaggaggaagcataaccattgtgttttgtcttcgtgtgggtggcagatgagcgcgtcgcggcttctgagaaatcccgtctccttggccttcctgggactgctgaccttcctgcttcccttatttccccctcagtggggactgcgccaaggcggggacaagaattcttgggtatggggattctgtggcgactctgcgggctcctccgtggggtcctgcgttgaggtgaaaaggataaactcttacgacgatgtcaatcctgaagctagttccatgtccctcatggagggtggggagtccccaaagctttcagctcacccacctgggcttggggggacactcttcccttgctcctgcctcccggtgccttctgtttccctgtctggcatgcctctctacgcccccactcctccacctgctcagctctccaaggacctggtatgtgtgcctcctccatgcagccctccaggctactccagcacaaccttggaaccatgtggttggtgcttacagtcagtcgcatcgtccatagtcatttcatctgtgttggcccattttgcccaactggattataaaggtctcagccaggcatggtggctcaacacctgtcatcccagcacttcaagaggccgaggcacgtggatcacttgaagtcaggagtttgagaccagcctgaccaatatggtgaaaccccatatctacaaaaactacaaaaactagctgggcggggtggtggacacctgtaattccagctactcaggaggctgaggcaggagaatcgcttgaacctgggaggcggaggttgcagtgagccgagattgcactattgcactccagcctgggtgacagagtgagactctgtctcaaaaaaaaaaaaaaaaaattgcagtctgggaccatgatcgtgtacgcactgacgggaatgccagtaggtagcgcatggctgtattatcccagtttcacacatgaggctgctggtgacacgaagcccagggatgctgagtgatgtgcgcacagcagagctgcgactcaagcccaccctgcctggcctgcaccaggtggaaccccatgcgcttgcctagcaaggaccagacaccgaggggccgttggttctaggacggcgagggtcagaaggagaggcctgaccggacgcagaggggccgttggttctaggacggtgagggtcagaaggaggggcctgaccggacaccgaggggccattgattctagcacagcgagggtcagaaggagagtcctgactggacactgaggggccgttgtttctagcgcggcgagggtcagaaggagggtcctgctttgtcctgcatggattgttggatctgggctttttagagctcggaggatgaaggagccagaaggcagagcaccatctgggtgtctgagtagatgagacgacttcttccagtgaacatgggttctgtctccatcagagtgaggcgatatatctgagtagatgagacttcatcagaatgaggtgatgtgaggctggagtgaggctgggctgggagtttgccgtggttggctggagctggtggtcgtcgttcagagggagctggcgctggctttggtgttcccttcagtgcagcattttcagcagtggagtcacccattctctgctagaatgcttctcttgtcggaaagctcactacttaatcctatgggggacagctctagtgagcccgaatctgaccccataacttttccccactgttcctgggtctgcagagcaacgtagattaagtctaagcctcgtttttgtttttggagacagagtctggctctgtcacccaggctggagtgcagtggcgcaatcttggctcactgcaacctctgcctcctgagttcaagagattctcctgcctcagcctcctgagtagctgggattacaggtgtgcaccaccacgcccagctaatttttgtagttttagtagagacggggtttcaccatgttggtcagacttgtctcgaactcctggcctcaggtgatctacctgcctcggcctcccaaagtgctaggatgacaggtgtgagccaccgtgaccagccaagtctaagcctctttccacgtggccttcaggtaggtgaagaacatcaacagaatccgacatggctggccgggcgcggtggctcacgcccgtaatcccagcactttgggaggccgaggtgggtggatcacgaggtcaggagatcaagaccatcctggctaacacagtgaaaccccgtctctactaaaaatacaaaaaaaattagccaggcgtggtggcgggcgcctgtagtccctgttacttgggaggctgaggcaggagaatggcgtgaacccgggaggcggagccgagatcgcaccactgcactccagcctgggcgacagagcgagactccgtctccaaaaaaaaaagaattcgacgtggctgctctccctctggccaccctgcccttccctgccacaccttccctgtatggcaggttatcaggccctgtgtcctgcagggcctttgcagtacagcctggtcatctttggtttttttttttctgattattcatattcattcattgtaggtgatttataaaatgcagagaaccacactgaggaaatgcctgcacgtcccgttatcccacggtcccactgctaggctggaaggtgatggcatcagctcccggccagtgctgggggttggtctgtgttatctgccacctcaccgtctacactggcaggccctggagcatcttggtatagacaggcaggcattgagaaagagtctgagactggagacccctgccatgcgcagtgggaaggaccatcacggtcgcttagcaatgtctgccacgggggtgggctgcagtgggggacacgtgaacgcccatgcctctccctgtgccaagtgacgggaacttggaacatcagtgaggccaagactggtcttgagtaacttcgggtccctaccttctgagtcctagaaccacattctgtttcttggaaggaaacagctataggcttgagttccctgtcaaccctcccttccactgaagtgtgacaaggagcttatgactcggggcacaggctatcgtggaagaaagacgcggatcctgttaacccagtacaggctgctgctgagctcagctgcgtggtaggggagtgagcccaggcaccacccctcgggcctggcacagctgccaggccaggttcctgctgtcgagtgtgcggcttgttggggcctgtggcagtggctccttgatacaaagctcgtttcagtgccctgcctttggcagccttgtctgggcaggacttgggcagcgggaagggctaacgatcggccccggggcctgccgacactctggtttgtttacccccgacctctgctctttcttcctctgtttctcccagcccatgaaacccctgaaggccaccgccaccacctcccagcccgtgctcaccatccagcagatcgagaccatcttctacaagatccaggacatctatgagatccacaaggagttctatgacaacctgtgccccaaggtgcaacagtgggacagccaggtcaccatgggccacctcttccagaagctggtgagtctgccagggatggagggtcctcacgcagggcctcagtggagcccatagtgttgcaggagcctcaggagaggaccgggcagccctctcggactccttgaaggcctgagacctctccgagtccgggaggaaggcctgggcctgtgtgttatggggtgcctggggccggggccttgactctaggcctcccctggtgcagccctgggagcttctggggtggtggagacaggctgtgtggataggtccttccaggggtggtggagatgggctgtgtggatgggcacttctgtgggagcaccatctctctcccggagggtgctccttctccctcccggagggtgctccgtctttcccggacggtgctccctctctctcccggagggtgctctgaggaaccagccctggaatgaaggcttcttgctgggcttcagtctcctgtccctcagtgaacagaggggcacatgccgggttaggggcatgaggactgctcccctgagacctcgggtctgtaaaaggaagcagttgggcacactggccgatgatcctctcctgaggtcccaagagcaggaagcactgaagcccagccctgctcaccactgcagggtcgggagcggcaggagtgggtgggttaacatgcagacctcgtgttgggaaacgttcacagaagtcttctggttccctgtgcttctgtgacaccctctcccccagctctgccccatctctggctgtgtcccctggaggacccccaggtcagactcatggagctccctccccacctctgctacgtaacgtctgaccgcccagcaggcaagagggagactgggagtccaggccgcggttcttctctgggtgtgagtggccagaggaccttctcctccttcctgccctgttctctgggtgtgagaggctggaggcctcctcccctcccctgccgtgttctggctgaatggacagggctctgcctttctcacgctggagaagactctccctctcctgcctggacactcctaggacctctagctgagtgtgttcagagctgagctccctgcctccggcgtcacctgctccgcttcctgtctttacctcaccgagtgcttcagactctttctggctgcaccccctcccccacctgtcctgtggactccactttttggccgttgctcacagccgccttttcctcttcttggccacccatggccctcacctggacagctgcgtatcctcctgtgtggctcctgcctccaggcccactcacctcccacccccacctctccttagaggggagagagtcactgaaacctcgacggccccttcagcggatccccacggccctcggatgaaggtcaggctccgaggaatggctcgagagaccctttgcacactgacccgtgtccagccccagccttggcagcttcctccccgcacctctgtgctcctgacactggactttctgttctcagttcccagggcaggcactttcttaactcttggtacttgaggccccgtgtgcctgaaacgtccttccccctctcgtctggcctcccctggtcagttcccagcttagaagggacctcctccaagaaggctttccaagtcgccaaatgcaggccttgtgccagtcctcgtagtgagcactagtaactgcctgactcccccaaaccacaagttccaggaggacggactgcatttcctttttttgttgagacggagtctcactcctgtcgcccaggctggagtgcagtggcgtgatctcggctcactgcaacctcctcctcgcgggttcaagtgattctcctgcctcagcatcccgagtagctgggattacaggcgcccaccatcacacccggctaatttttgtatttttagtagagacggggtttcgccatgtcggccaggctggtctcgaactcctgacctcaggtgatccgcccgcctcggcctcccgaagtgctgggattacaggcgtgagccaccgcgcccggcctgcatttccttcttcttagactcccagaaccagcccagtggtcactgcttgaatgagtgaatgcaccgtgaccttgaccactgggcctcgggagaactcggaagggcatggagggagacgttgcagggcctgagatttctgtcctgagagtcctgtttctccagcacagcttctagagccgtgtcacaaagtgggcttgaatcccagcgctgccagattaaacctgcaactgggcaacttacccaaccgctctgaatcagcttcctcatctgtaaaaaacaggatagtaacagtatttacctcattgggtgattttgaggagttaatatctgaaaactgcatggggctgagtgtggtggctgacgcctgtaatcccagcactttgggaggctgaggctggaagatcacttgaggcttagagttcaagaccagcctgggcaacatagcaagaccctatctctacaaagaaatagaataggcctgactgagcgtggtggctcacgcctgtaatcccagcactttgggaggccggggtgggtggatcgtgaggtcaggagttcgagaccagcctggcctacatggtggaaccccatctctactaaaaatacaaaaaaattagcagggtgtggtggaatgcacctgtagtcccagctactcagggggctgaggcgggagaatcgcttgaacctgggaggcagaggttgcagtgagccaaaaccacaccattgcactccagcctggatgacagactgagactctgtctcaaaaaaaaaaaaaaaaaaaaatggctgggcacagtggctcacgcttataatcccagcaacactttgggaggccaaggtgggcggatcacctgaggtcaggagttcaagaccagcttggccaacatggtgaaaccccgtttctactaaaaatacaaaaattagccgggcatgataacacgcacctgtgatcccagctactactcgggaggctgaggtgggagaatcgcttgaactcgggaggcagaggttgtagtgagccgagatcgtgccactccactccagcctgggcgacaagagcaagactctgtctcaaaaaaagaaatagaatacaataaagtaaaagaaaaagtgcttggaacagggcctggaacatcataaattaataagtactcaataactggtcattatcatcagtgccattattattattattattattattattattattattattattaaattgggaagaggcaccctggaaggtatccttccaagggaatgccacactctggttctagcatacccccccctgctccctccggttcagggatggtgaacacctgtcatcactgcctgctcacctgagctgagtggcctggggggcatcctctcctcatccctcaggagggtagaggagagcaaacctagggttgctggaaacgctgtcacagtttatctttgtcacttggacctggctgtccccggttctggtcttggctccacaggcctggccgtgaatctgctacccaccactttccctccccagcatcgtgaaccgatgcctgaggcccctggggctgcagatttgggagggcccggggggagccgggtcaggtctggcatccggaggtggtttattttcagccgaagactctgggtatttgattattcgttactgagagaagggaattagcgtctctgctgtttgttttatgagatcactccagtgccaggctgctgtttccaggcaacctgcacttcccagttaatgaacctgccaagccaggcctcgggccctaccgcctggggtgactgtggcagcggcagtccctgagattaccgtgaccctggacgcaggcctccgcacggctggctcctgcccctggctcctgggagggtggtgtgccaacccgggcctccaggctttctccttcttgtgggaaagggggcaagaggagccttttcctggaagaatatcggtgatctgactttggcttaggcagcgactgtctagtatgcctcgtgtagcgtgggcattgatgggccgggcctcagtactccctggaaaaggaaataaactccctcccgtccggccccgcccccttttaaggtcaggccccaccccctttaaaactcaggccccgccctcttttaaaagtccggccctgcccccttttaaagtcctgcccttctgcagctgagacctgaatgcctctggccttggcgtcacgccgggcgtccccactcgcgctcccctctggcttttccagatgccccccgctcccctgccccaccagcttcctcaaagggctctgcctctgtactgggaggctccaggctcagccgatgctgcggccagcctgcccccacccctacccccaccccagcctctctgggtccttggggagcatgaggatcctgcagaaagcagagtggtccggggtgggggtccacagcagcccacttcccccagcaccttggtgggaagcagaggcccctgaggaagccaggcagcagctgtatcccccttgctgctgtattgaaaaacatttaaaccagaaactccaaagaataacagcagaaccttctaatgaagaaaatacagcgtcacacatgaaggtggagtctcccctccctcctccctcttgaagcagctactggcatgaatttggtggatagccttccagactgcagtttgtgtgtttactacatatctgtatctattttgggttggcctgtactttaaaaaaaaaaaaaggtcttgctatgttgtccaggctggacttgaactcgggctcaagtgatcctcccacctcagtctcccaagtagcgagggctataggtgtgtgtaccacagctcccagctgcatgtactttaaaaatgtgtctaagccaggcgtggtggctcacgcccgtaatcccagcactttgggaggcggaggcgggtggatcacctgaggtcaggagttcaagaccagcctgaccaatatgacgaaaccctgtctctactaaaaatacaaaaactagccgggtgtggtggtgcgtgcctgtagtcccagttagtcaggaggctgaggcaggagaatcacttgaacccaggaggcggagtttgcagtgagccaagatcgtgccagtgcactccggcctggttgacagagcgagactccatctcaaaaaaaaaaaaaaaagtgtataagtatacacatatatcatattttacagttcaacccatgttcgttttggagcttgtcagcaatcgtattttacagttcaacccatgttcgttttggagcttgtcagcaatgctatgtgtaaatcgggtgcatccatgttcatggctgtgtgcgcggcttcccccgtttgtgagcatttgttaccagtccctccactatgaggaggaaaagtgagatggtgaacacccttgagtcccctggggcacacacataggccatttgctccagagcactgctgtctaatggaaatagcttatgagccacgtacatcatttcacattttctaatacccaccttttttttgtttttttgagacggggtcttgctcttgtcacccaggctggagtgcagtgatgcaatctgggctcactgcaacctccacctcctgggttcaagcgattctcctgccttgtcctcccaagtagctgggactacagatgcgtgccaccacgcccggataattttgtatctttagtggagacagggtttcaccattttggccaggctggtctcgaactgccaaccttaggtgatctgcccgcctcggcctcccaaagtgctgggattacagttgtgagccaccgcgcctggcccctaatacccacatttttaaaagtaaaaataggcaggtgaaattaattttgagaatatcttttatttattcccgcagatccaaatattatttgaacatgtaatcagtatttaaaaattaacgaggtaatttacattctcttttacatactaaggctttggaacccactgtgtattttacatgtccggcacgtctcagtttgaaccggccgtatctcaggtgcttggtagcctcaggtagctggtggcgactgcactgaacgatacggctctgcagtttgtatgtaaaagtggatttgctaagcaatcgatgggctgtgcctatccacactgttattagttcaactgaaaataggccatgcctattctcagctttattagttattaacaaattgctctccaaataattgtactaatttacacttccccgagtagtctaagagtttaaattggccgggcgcggtggctcacgcctgtaatcccagcactttgggaggccgaggcgggtggatcacgaggtcaggagatcgacaccatcctggctaacatggtgaaaccccgtctctactaaaaaaaaatacaaaaaattagcctggcgtggtggcgggcgcctgtagtcccaaccactcaggaggctgaggcaggagaatggcgcgaacctgggaggtggagcttgtagtgagccgagatggcatcactgcattccagcctgggtgacagagcgagactccatctcaaaaaaaaaaaaaaaaaaaagttttaattggccgggcgcagtggctcacacctgtaatcccagcactttgggaggccgaggcaggtggatcacctgaggttgggagtttgagaccagcctgaccaatatggagaaacgccgtctctactaaaaatacaagattagccaggcgtggtggcgggcgcctgtaacgccagctactcgggaggctgaggcaggagaatcccttgaatccgggaggttgcggtgagccgagatcgcaccactgtactgcagcctgggcaacaagagcgaaactccatctcaaaacaaaaacaaaaacagggagtttaaatttccccatatgcttgccagccgttgctgtcaattagacttttaaattttgacccttctgatgagtataaaatatctcgtgatggctttaatttgaatttctaccctttggtcccttaagaggaagtgcttatatacagcgcagcgaagcctttccataaatatttggggaattgacttatggagcctcggtttccccttttgcagaaaggggcgatggggtctgccctgcctctcagaagaggcgaggctctgtgtggttgtgactcaggttgtgactgtgtgagtgacaggcaaacgtgtagtgaggctggggctttggctccttggaggtagaggaggtggaagaggtgaggacggggcctcaaggccaagggaaatggaaagacagcatcttcatttgttgttttgttttctttttgagacggagtcttactctgtcacccaggctggagtgcagtgacacgatcttggttcactgcagcctccacctcttgggttcaagcgattctcctgcctcattctcctgagtacctgggattacaggcacgcgccaccatgcccagctaatttttgtatttttagtagagacggggtttcgccatgttggccaggctggtctggaactcctgacctcaggcctcccaaagtgctggggttacaggcgtgagccgccacgcccggccaagacagcacctttaaatgtcgttccccacgctgcacgtggggagggaggcctgagcaggccacacgtgccagctccccccagcacacacacccccctctctccctgctccggctaattccaggatgtgaaggaagtatgagacattaagggatttcaaaccctgggagaccttcaccgtgctgaggaaagctggatgctgtgaagagttgaatttctagcaggccaacaaaggccctagcctggtctccccaaccccagaccccctcattaaccttattggctgagctggtttccatggaaactgtccagttcaaagggacactgtaatatgttcatccctgcgtttccccaagttcccaacgagctgagtgagaggttttcagtgcaggggagctcccggtgctccgtgaagctttcatccattcattaatcctctcccctcccaccctcctctccctctgttccctgactcctccctgcaggccagccagctcggtgtgtacaaagcgtttgtcgataactataaagtcgctctggagacagctgagaagtgcagccagtccaacaaccagttccagaagatctcagaggtaggccgctccccacatagccaccctgagggacaaggagctttgggggctgctcagagcccttggtctcccctccctcgcttgccagtcggtgaagtggttactctaatgggtaacacttagcctgatatttgctttcttgcacctgacattttccctcttaatagaaaacgatctattttatttatttttttattattctctttcagattagagagaggaacaggggaggcaaaaaaaaaaaaaaaaaaaaaaaatccaaggcagtgttctcccacaccacactatggtgaccttgagcaagtcacgtcccccctcttggcttttatgtcctgtccggtagaatgaggggtttagaaatggccagataatccttttttttttttttttttttttgagacagagtcttgctctgtcgcccaggctggagtgcagtggcgcggtctcggctcactgcaacctctaccccctgggttcaagtgattctcctgcctcagcctcccaagtagctgggattacaggcgcacaccaccacgcctggctaaggtttgtatttttagtagagatgaggttttgccgtgttggccaggctggtctcgaactcgggtgatgtgcccgtctcagcctcccaaagtgctgacattacaggtgcgagccactgagtccagcttggccagctaatcctgaccttgcttgataagaatcactggggcattgtttaaaacacagatttcctggcaccttccccggagcttctgattcagaaggctttgcgtggggcccaagattctatatttgaacaagcttctgggtaatatttatgacagggaagtcttgaggaaatttggactataggtcgtcttttaaggttcttgccaactctaagactgccatcccataaacacaaaaagggtaagagccacttatgtggagaaggagccttagaatccctggccgggaacacgcgtgcttctgctcctgaggcccagccttcctggccaggaacacgcgtgcttctgctcctgaggcccagcctacctggccgggagcacacgtgcttctgctcctgaggcccagccttcctggctgggaacacgcgtgcttctgctcctgaggcccagccttcctcccgcactcctccacagggcagaggtgcagtcctatctgccatcaacatttctacctaagaggtggcatggagggacagttgcttaggatccttcaggacagagcccagttcatccctttgtccaaaaagacctcagtggcacccctgaagcactggcctgagaggaacagcccccagctcagggcaagagaacctccatcctagaaaaggggagaagcttctgcagttttgggagtcctgccgtaaaggcccctcttggccctttgtgttcccgtctcagctctaacgctagaagagttggggaaacgcagggtagttttcctgaaacttcaggggtgacggtcgatgcccacgtttagaatccaccgagaggcagcagagaagctgacagttggagatgaacatgtcaccttcattactgttaaaaaaatgcagcttggaaaatgtggatttggatctgtagccacagtgggcttgctgacacttcgcctctggaatgaaacgtacctatagaagccgggcgtggcggctcacacctgtcatcccagcactttgggaggccgaggcgggcggatcacctgaggtcaggagtttgagaccagcctggccaacgtggcgaaacgccgtctctactaaagatacaaaaattagccgggcgtggtggtgcacacttgtaatcccagctatttgggaggctgagacaggagaatctcttgaacccgggaggtggaggttgcagtgagctgcgatcacgccactgcactccagtctggtgacagagcgagaccctgtctggaaaaaaaaaagtatctattgagtcccttgcaggaataggaaaacacaggcccctctccacaatgaggacagagcccacgcctcttacccagtgtgcagagagaggatggctgaccatagtttcttctcccagacccatggagcagatgtgtcaccctctgcctgggaggacgaagtgcagggtggggaagtccctctccatggagtcaagtggctggagaggccaggtgcagtggctcacgcctgtaatcccagcactttgggaggccgaggcgggagattggcttgagcccaggagttcaagaccggcctgggaaacatggtgaaaccccgtctctattaaaaatacaaataaaaggggctggagaaatggtgctttccctgcggtttccagcccaacccaggaactacctggactcccctggtctgtgttcagatcagccctgccaaggccgcccaagatcccggggtcagacatggtgcagagagtgtggggtcttctcttggcctgggctgattgcctgttctctgtgcctaggcagaaacccccacacccaaccataagcccctcacagcctgcccaccctggagggcagagccaggcccctggctttctgccaggtggcttctcatcctgactcactcgatgacgtgcttgcttcctgctgaggctgccacttaattactgcaattaggctcctctctgcagcaggagtgatttcataccctagacttcactggagggggcgtgaggaaacattcccgaaatctgggagtccaggcaccagccagagacacaggctggggacgctgagtatcccccacccccccgccccccaaaatatacacacacccaagctccatctccaggagttttctctgtctagaaacagcttgagacagaagtaggaagttcctgctgtctgagcgcttcctcccctgcagaccaagcaggtggcatcacctcggcagctgaccttggcctcatcacctgggcagctgaccttggcctcatcacctgggcacctgaccctggcctcatcacctgggcacctgaccgtggcctcaccttgcctcctgccttccctcccacacccctctttgaggctccgtgtgctccgtctgccaagtggggatggtattacagctccagttgcaggctgcactgtcctgttagcaaaagctggggctggaacgtctctaaaggaggataaagaggcttggagcagatgagtcatcccgggggtctttccagtactcactacctgctgcctggcttgggatccaggaggggcattggctgttcctccctcgaagcttcctctcggacccccagcatgggcagtggtgggtggggagtgtcgggggtgctgggggctgagtaagtgctctctgatgggggtaggatgcagctcactgtcctggggagctcagcatctctgccgaaggtccaccacttccctgctggcgtgtgggacccttccttcctacctcatgggttcctcatgccctaaagattggctggagtacctggcgctggtcaactcaaaccctgtctgcccttggccgacgtgtagggttcctgagtcggggttcctgtaatcacagggctccctgccagcctctctcatctctgggacctggagtcccttccttcttgcccacgccccagccactggactccacgaggctccaggagttcacaggtgtggtgcaggggattggggtggcagaggcagcccatggccatggggctcctttgtctttctttttttttttttttttttttttttttttttttttttttgagacagagtctcgccctgttgcccaggctggagtgcaatggtgtgatcttggctcactgcaacctccgcctcccaggttcaagcgattctcctgccccagcctcccaagtagctgggattacaggcacctgacaccacacctggctaacttttgtatttttagtagagatggggtttcaccgtgttgaccaggctggtctcgaacttccgacctcaggtgatccgcccaccacggcctctcaaagtgctgggatgactggcgtgagccgccacacccggcctctgttctcatatgtacaccctgagtttcagaactccccttcttgccaggctcacagtgggggctgggagaggtgagggacagaacaggccatgactcctctcctccctttggcaggaactcaaagtgaaaggtcccaaggactccaaggacagccacacgtctgtcaccatggaaggtacctcggggagcgggctggattacaggcacctacctttgtctggctgtgcaggcaacaggctgcgtgaacgcggcgcccttccccttgtgtgtgcgtgtgtgtgagcgcgtgtgagcgtgagcgtgtgtgagcgcgtgtgagtgtgagctgagtgcgcgtgtgcgcgcacgcgaggactctagcctcgtgcccaggcagccagccagctacaaacgtgctcctctttaggatgccagcaggctgctggctccctccctccctacccctcctccccttccccttccctcctctcctcgccacgcgcctccctcccctcccccttgctggaagagcactccggagcggctgcccgatgctggagtccgtgcggcagcatcagcaaggtggctgagtggccgggctgctggtgggcgccggggagcctggagcgatggctgcacgctcccgccgcggggacagaggctgccatggagattctcctcattattcgcttctgctgtaactgcacctatggtaacccaggtgctcgctgtgggaggtggcggaccctcccacctctgggggccggctggagtgggcttagatgtggccggggaggttagagggccgcagggaaggagggtgggcgagcggctggacctgaattcccccttcgttttggcggcatccagcctagagttgaaacctgggggctgctcagagcagggccgcttgcaaatggaaggaccaggctggaggggtccaggtggccccgaggatcggtggggaattggtgggctagtgtgagagaacttcctggaggggctgttagggagagacggcgacgagctgtgcccgcagacgtagtagccctgaggccagggagagggtctgcgggggccaggcacagcgtggcgatgggtggcgatggtccggacggcggcgttgccagccgagagggtgccagcgcgagccagagggagaagttgggagtttctttgtttctggagagaggcgcggaggctgggcggcacggtattgtgtgctccgcgcacatgcagcagtaggcggaggacacggaggggctgtgggagcaggaaggagaggtttgtttccagccgtgagagacccccagccgaggtctgggccctcaactgtggaaggcaggtcggcagggccagcgggagaggggtgtggcaagctactctgtgaaggtcacacacacacacacacacacacacaccacctttcggtggaagggacccggaccatcctccttgcagctcccgcagctggctgggggctggggggaagtcccgggacaggtgcatgtcatcaacacgactgtcggtcgtaggaggatgaagccggcccaggtagggaggtgtccagaagcccgtggaccctgcctcaagaggcaagacgtgccaaggggtgccctgcctgcctgtggcagggagtggggtgggcacgtgtggctcccaggccggctgctctgggcctgagtctgtgggagcagcaggcggctggttttaggaccttcctcttccttcccaccaggtgtttcggctctgcacccttctcagtcactttgctttcctatctccctggtaacctggagctccttggagctccttgtcgaaggctgacttgagggggatggtggcttgccggaagagagatggcaggtttcctgggctccttcccaggggcggctgtgctggaggggctgtgtggggccagtgccccctgaccttctcaggaccctcttgatggaagcaagctctgaggcagcctctctcctgcggcccagcagggcggctgcaggaaccctgttctcacttgaaattggcctggtcagcgatcagaggagaaatggtctttttggtctggcctaggagttggtcaggtcttgactctgcctccctgaaaaggaaacgtacccttggcttcctctcccttccccaaaaggaagcttcgactcagtgaaacggacctgggacctggagttcacgttgcttcggtctccgtgatactgttgttgaagtcggcttcaaagtggggaatgaggagtgaaagggccagctcgtgaggagggggctcaccccatcctggtcactctttccaagaacgctcctgtggttcattgaggttttacaggtgctgcctttccctgaagaaggtgcagctcaaagcaaggagtgcgggtggatctacccagctcccaccacttgtagccacaagtctctggcctcagttgccttgtctgtaaaatggggctagtgagaattgcttcccgttttaatcacaggaaataatgagagcaaagcagttaactcagtacccttgggcacagagcgagtacccagcaaactagagagagaccagcttgctgcccaagtcagtgtcagtggagagggagagtgggtgaggccgggcaggaagcaggccagcctgcaggagcccagggacaggggaagggccagagcgagtgcctcaccctgagttctcaggggaccccagcgtgcaggggccgtggggagcacaaacttcagggccgctcttattcccccggttccctccgtatctgatgtggtcccagtgccgccaccccccccacccccaccccccccgtgcacctgccctcctggccgcccttccagggctcattccacagccttactcaggtggactctggaggtgaccacagacatgttaataacccctctgaaacccaacctgccatgtgttcagacctctgagcttagtcagaaacctcttcctcttgggacccaagagagggctgcggggagccgataatgcagtgtcagctttctgtggagccgccactccggagcccaccctggcaggtgtctgctgagcttgtgctttcttttgggtctctggggttctccagtgtgattttttccccctgaagatgggctgagccacaggtgggtgccttaaacagcctcagaaatggatcccacctgagctaggacctgggctgcaccctcagtgccgaggataccccaagactggcctcattccttcaagcttccatggcccatggggagggtctctggaaactgctagataagaaagggctacagatatgtcatatgaagtgtatttacgtaaaccagtggttggccgggtactcatgcctgtaatcccaacttttggcagactgaggcaggaggattgcttgaggccaggagttcgagaccagcttgtatttggcttgaggccaggagttcgagaccagcaacatagtgagaccttgtctctatatttatttttatttaaacgaagactcactgtgtcgcccaggctggagtgcaatggcgcaatctcagctcactgcaacctctgcctcctggattcaagagattcccctgcctcagcctcccaagtagttgggattataggcgcctgccaccacacctggctaatttttgtatttttagtagagatggggtttcaccatgttggccaggctgttcttgaactcctgacctcaaatgatccacccgcttcggcctcccaaagtgctgggattacaggcgtgagccaccctgcccggcccctcgtctctatatttttaaaaaaattaaaataaatacataaataaaacataaagcagtggttttcaaccattattatacattcaaatcagtaaagaagctttatagaaatgctgatggcccttgtggtcttgcagagatttgggttgagttgacggggctggggagcagcatctgtatcttttaaccgctcccccagtgattccgacaggcagccaagctcggactgcgggtaaggctggtggccctgctgaggctgcattttcttcacagccagcagattgctccctgaagtgtctgcttagccgcgcacggggtatttatatctcaggctttggagaactatcaggtttggggcccggctagggcgtgcgtgttcacgctgggacctgtcacaacctggtcttatgggacacccagtctgggatccttcttcccagatgaccaacctgcctctgtcactgcccctgcggcaggaggcccaaggtcatgaccccagggacagagcatccaggtgcaggactgaagctgagcctcctgttgggagggtgggcgcagccgcgtacaggaagggtgttgggaagtgttgatccaccagctgccacctccacctgtccctgctgaatcccagccatcctcacttggtgtccgggttgtggagggtgtggctcttgggggcctgggctggccttgcctgcgtcctcccagcctctttggggctctcatatgtgaggcctaacctgagttgcttcaggaaacctttgcccctcaggctgccacgtgtttgagagcacagccttttttctttttttttgagatggagttttgctcttgttacccaggctggagtgcagtggcatgatcttggctcgctacaacttccgcctcccgggttcaagtgatttccctgcctcagcctcccaaatagctgggattacaggcatgtgccaccacgcctggctaatttttgtatttttaatagagatggggtttcactggttggccaggctggcctcggggagcagagcctttctgtggagatcaggccagcctcctggcctccagcctccctgcctccagccttcctgtgctttgctatctggggtttgaggatgtggggaggggtctttcctctgagagatgaggccagtcctgtggatcacagtgaggcatgccaatcccagctggctgtgcctggccttcagctccaggagcctgagaatgataaggtctggagagctgcccttcctggaaacacagcatgtctccttcccccattctggggtcctgcatgtggcaggtgtgctagactctgcagggcatggctgggtggagctgtgtgattctggggttctgcgtgtggcaggtatgctggactctgcggggcgtggctgggtggagctgtgtgattctggggtcctgcatgtggcaggtgtgctagactctgcagggcatggctgggtggagctgtgtgattctggggttctgcgtgtggcaggtgtgctggactctacggggcgtggctgggtggagctgtgtgattctggggtcctgcgtgtggcaggtgtgctagactctgcggggcgtggctgggtggagctgtgtgattctggggtcctgcgtgtggcaggtgtgctggactcttcggggcgtggctgggtggagctgtgtgattctggggtcctgcgtgtggcaggtgtgctggactcttcggggcgtggctgggtggagctgtgtgattcagggctgggggtccaggagagcatctgccttgagccaggtgaggccaggacaggcctggggaggggggcggggcggctctcgatgaagccatgtctgatgggagaggaggcagggctgcggagggagcaggggctgccagggctgtgtgtcacctgtgtctgctgtttggtcggcccggggagtgagaacagaggtgggggctgccgtgggctcactctggtgtccctcgaggggtgttcacgtgggaagcatgcgggtggggggacgaagctggtctctggggtgttgggttgccctcgtccatcatcctcttcctccttctccctgtctcccccgacagctctgctctacaagcccattgaccgggtcactcggagcaccctagtcctacacgtgagtgtcaagcctccgaatggccagagagggcttaggagttcagtggaagactgagcctgggtgagagggtgctggagtcaccgagaacagtccacctggggaatcaggggttcctaggctccaaggatgcctgtctggcccgcggtatccatgccgccaggctagggcctgaatacagcttggctactaagcttgacgtggccaggtgctcccggggaggcaggcattcctgcttccccacccgctgcctcctggtctccagtgtccttggagcagctgcagggcagacacagggtttctctcccagctgctcggggggatgagcctccacctggtctccacactggggagagagtatgactgtggccaggagaagagggggcagccagggccctctcccctgctgtgctggctctgattttttttttttttttttttttttgaggcggagtctcactctgtcacccaggctggagtgcagtggtgcgatctcggctcactgcaacctctgcctcctgggttcaagcaattctcctgcctcagcctcccgagtagctgggactacaggcgcccgccaccacgcccagctaatttttatatttttactagagatggggtttcaccacgttgcccaggctggtctcgaacttctgacctcaagagatcccccgcctcggcctcccaaagtgctgggatttcaggcatgagccgccgtgcccggcctgactctgatttgtagttcagattttgcgggaattaggcaggtccctgagtgcccaccctttggatggggactgagcactccccggtggccacacatcaggccccagagccgctcccctcaactcaccgcctcacccttcccaggacctgctgaagcacacacctgtggaccaccccgactacccgctgctgcaggatgccctccgcatctcccagaacttcctgtccagcatcaacgaggacatcgacccccgccggactgcagtgacaacgcccaagggggaggtgagctcagagcccggcacggcccctcacccaggctgagaagtatcaggtccctcgtccccttctctcacacacgggcggcaggtccctcgtccccttctctcacacacgggcggcaggtccctcgtccccttctctcacacacgggcggcaggtccctcgtccccttctctcacacacgggcggcaggtccctcgtccccttctctcacacacgggcggcaggtccctcgtccccttctctcacacacgggcggcaccgggtgcctcctgcctctccaatcctgatcccccattcccagccaaggagaggttttcagcccttggtcaccctgatgacctgcagctttccaggccctaggctgagaagtttaagtccagtgtctcattaatcctcataataatctagggaggccgggcacggtggctcacacctgtaatcccagcactttgggaggctgaggcaggtggatcacttgagttagaagtttgagaccagcctggccaacatggtgaagccccgtctttactaaaaatacaaaaattagctgggcgtggtggcggatgcctgtagtgccagctactcaggaggctgaggcaggagaattgcttgaacccaggaggcggaggttacagtgagccgagatcgcaccactgcactccagcctgggtgacagagtgagactccatctcagaaataataataacaatccagtgagccagaagaacctgaggctggggagtctctccaggtccaccacgcagtctttcagccactggtgtcagagctggattcctcacctgggactgtctggaggcccacgccggggaagtggcctccgggtgcctcattcttgaatgcagacacctgcctctggccagtgtgatgccgtcagggtctcctaggaagcgaagggagcaggagcttggagctgcttcagctcggcctgcacacgcagtggcttgcggggagcccacagcaggaaaggctggcgttggaggtggtggaggccgtccaggttgccggaatgtccagtgggcacctgcatgtgggacagccgttccctgggggcccttcttgatgcaagggtggggacagcccagcaaggggagtaccaggaagcatgagagggacagttgccttcgtggattggcagccgggcccgggtgaaaggcttcctgtccaggggaggccattaggcggccgttacgagtgaggctgacagggtgtctgctcctgtggtctgtttacgagcccccagggtctcctggggagaaagtggtgagggacaggcctggacagtgtccactgggcagagagagccgattccgtgcggctcctggtgctgatgtgcagcgtctggggatcccgtcgtctgttttactctggggatatctgaaaaatctccagagggcttagcgtaccctccgttttcagtcatcctttttttgagactgaatctcattccatcgtccaggctggagtgcaatggcgtgacctcagctccactgcagcctccaccctctgggttcaagcaattctcctgcctcatcctcccaagtagctgagattacaggcaggcgtcaccatgtctggctagtttttgtatttttagtagagacggggtttcgccacgttggccaggctggtctcaaactcctgacctcaggtgatccacccgcctcagcctcccaaattgctgggatgacaggtgtgaaccactgcgcccggcctcggtcatcttaattgtatactttgaatacgctcacctacgtattacagcagatgtaggtcacaccgtgtatcatacaggaaaggctggcacagatggggacgaccccccggctctgagcgggggttggaaactctggaactcccacgtggagcagaaaccacccagagcccaggttagagttggctgcaggtcccctctgggcactgctgcagtcccaggctggagggcccaggtctcatccccagggggctggagaagccagggaggagtagcacagacaggcctgagtgggtctcgggtctcgggtctcggttgagccggggctagatgaagttcgccgccgcggtcgggagggattgcaaacggggatgttcgtgccccagggtggagaaaccaggtcgtcccgggcagggggctccagggttagccgcggagagccccgtgcgttgcacacacttaatgtgccaggcactgtgctgtttcacatgcaccatctcgatgagtcaccttatgaggcagacctcactgtccgcacttaacagaaggtgaatctgggattcagagaggtcagggagcctgtctgagatcacagctgagaagcctgttggcattcaaacccatgcccatgtgactccaaaggcagtgcttgaaccacctttggttaagggatgacaggctatgccgcctctcggtccagtcctccctggctggccgtgcccccgtgtgcaggctctgccctcggccgcattcccctctgagcaggctggggggtctgccatctccctcagacgcgacagctggtgaaggacggcttcctggtggaagtgtcagagagctcccggaagctgcggcacgtcttcctctttacagatgtcctactgtgtgccaagctgaagaagacctctgcagggtgagtgtgtgagtccaggggcacggggcgggggagggggtccggacctctgcggggtgagtgtgcgagtccggggcgggggagggggtcctgacctctgcggggtgagtgtgcgagtccaggggcgggggagggggtccggacctctgcgaggtgagtgtgtgagtccaggggcgggggagggggtcctgacctctgcggggtgagtgtgtgagtccagtggcacagggcgggggagggaggccggaccctgccacccatggagccttcagcaactttgttggttttttttcttttgagacagggtcttgctctgttgcccaggctggagtgcagtggtgcgatctcggctcactgcaacctctgcctcccgggttcaagcgattttcctgcctcagcctcctgagtagctgggattacaggtgcacgccaccatgccaccatgtctggctaatttttgtatttttagtagagacggggttttgccatgttggccaggctgatctcaaactcccaacctcaggtgatctgcccgcctcggcctcccaaagtgctgggattacaggcatgagccaccgcgcctggccggttttttccttttaaaaactatattaattaacttaatttcactacatagccttttttcctgaaagtaagtcatgtttttaattataaagataatataaggccattggaggaaaccccgtcccccactgaagcatgaggtccgactcctgccgcgctgcttccttccctgtttttaaatgttctcatgtttcttcacacagtcgtaatcactgtgaatgcccaatttggggctctgctgtttctgtttcgtgtcataagcattttccctgttgctgcctcatcttcataatcatccttttactttcctgcacgatgttacccgtagatgtgccatcgtctacttaagcattctccttttattagacatctctgaatttctgctaactgcagtgctgtgaatattcaccacgtctcctgctactatttattgagggtttatgccatgccaggtgccgtgacacatgctttgaatacatgatttctagtcctcccaacacctccacaaagtagcgactgttgttccctaatcatagatgagagaggagtcttggagaaggtaaataagcagcccaagctcgcacagctagaggcacaggtgggactggaaccccaagctgacgtgcaaactcctttgagcctccttctctctacccgggagggtgggactggaaccccaagctgatgtgcaagctcctttgagcctccttctctctacccgggagtgtgggtctgctctgtgccttgagcagaggctcattctgcgttcattcacacattcttccacccacacttagtgatcaactgcagtgtgccaagcacaccccttctcacggctgagaagcggcagtctggattcaaacccgtgtctgtgggactcgtttaccatcaggctatcttgcctctcccttcagccctccctggttggctgtgcccccaagtacagcacaggggactccacagccagtgtgttacaccaccaggctatcctacctctcccttcagccctccctggctggctgtgcccccaagtatagctcagggggagcaagccccacgcccacctcaacactcaagggtcagaatgagaagtgcaaatctaagtcctaggggaaggatcgatgattatgaacgtcaataaagggatgactgggcgggcacggtggcttatgcctgtaatcccagcactttgggaggccaaggcgggtggatcacctgaggtcaggagtttgagaccagcctggccaacatggcaaaactccgtctctactgaaagtacaaaaattagctgggtgtgatggcaggcacctataatcccagctacttgggagaatgaggtgggagaatcgcttgaaccctggaggcagaggttggagtgagtggagatcgcgccattgcactccagcctgggaacaagagcaaaactccatctcacaaaataaaaataatttaaaaaataataataataaaggacatgactccctggaactagatcatgtttgagatagttctgaggcagagatggcaataataagcacacatgcttctgcctgtcgtcctttgcgatggcagacattactaatcacatatgcctctgcctgctgtcctttgccatggcagacatcactaatcaactagggcacactttcttgctagacttggatgtggctttgtaatcctccacccagtgttgacccatgtgaccactcttgataagaggtggcatttggaataacacctgtattccattgctagcctgaaggatattgaacacggatagtctagaagggagggaggggattgtggtggggaataggaaaatgtgagcccagccaggaaggcttcgctcttcttgatacctaagtggtttgggatgtttgacaacatgagtcatctgggccagaagcctggtaaggtgaaggggcggagttgctccctgcgggcggggcggaccccagaacccagctttcatcactccagtgtgtgtttcccaatcaggctcctcaggagcagggatcgttcttgcttctggcgagttctcagtcaacccctgtcagtggttctgtggttctggacccaagagttgaggctggaagagccaggctccctctggctcatggctccctctggctcgtttgcaggaagcaccagcagtatgactgtaagtggtacatccccctggccgacctggtgtttccatcccccgaggagtctgaggccagcccccaggtgcaccccttcccagaccatgagctggaggacatgaagatgaagatctctgccctcaagagtgaaatccagaaggaggtgagcagagcttggtatctgagcctggggccctttgagccagctgtgttgggggaggtggaggcaggaagttgtaaggtttgagactttgagagggagccttgagtgtgtagttactaagggaaagaccccgactacagtagctccaagcagatcgagggggtcagtgctcaggatttcatagggctaacatgggaagtgccctggaaagcagtgcatgttgaacacgatagaaaggggaagcaagtagccaggcgcagtggctcacacctgtaatcccagcactttggaaggccgaggcaggtggatcacctgaggccaggagttcgagaccagcctggccaacatggcaaaaccctgtctctactaaaagtacaaaaattagcagagtgtggtggtgggcacctgtaatcccagctactcgggaggctgaggcagtagaatggcttgaacccgggaggtggaggttgcagtgagccaagaacatgccaatgcactccagtctaggcaatagagtgagattctgtcaaaaacaaaaaaaaaaagtggaggtagagggaagcaagagaagaaaaagcaggcttttgtaaggaaaagcaggacctgtgcaaggaaaaggacctgggaggcctctcagaaactgacagatcaagtaggcaaataaataaggagagagaggacctgaatgccacaattaacatgcttgacttaaaaatgcagagaagcttgtgccctgacagaaaactgagattcttgtcacacacgtttgggaccttcacatttatcctataataggccactaaggaaatctcaaaatttttctgcaagttgatagcatacaagtcatgttcacagaccacagtggagtaaaattagaagtgaacaagaatattggtcagcctgggtgcagtggctcacacctttaatcccagaactttgggaggctgaggatggtggatcgcctgaggtcaggaattcaagatcagcctggccaacatggtaaaaatccatctctactaaaaatacaaaattatccaggcgtggtggatcatgcctgtaatcccagcactttaggaggcccaggcaggcaggtcacctgaggtcaggagtttgagaccagcctggccaacatggtgaaaccccatttctactgaaaatacaaaattagcctggcgtggtggcttccgcctgtaatcccagctactcaggaggctgagacaggagaattgcttgaacctgggaggcagaggttgcattgagctgagattccgctgctgcactccagcctgagcaacagagtgagactgtctcaaaaaaaaaaaaaaaaaaaaaaagcattggtttggaaagttcaaactgacaaggtaaagaggaaatcaaaattcaaaatgagaactgcaaactgtttagtgctgtctggaaatgagtgtactacataccagtacccatggatgcagccaaagtgctgtttagaggaacatgaatagccctcagttcacataacaacagtgtctagaggaacatgcatagccctcagttcacataacaacagcgtctagaggaacatgcatagccctcagttcacataacaacagcgtctagaggaacatgcatagccctcagttcacataacaacagcgtctagaggaacatgcatagccctcagttcacgtaacagcagcgtctagaggaacatgcatagccctcagttcacgtaacagcagcatctagaggaacatgcatagccctcagttcacgtaacaacagtgtctagaggaacatgcatagccctcagttcacgtaacagcagtgtctagaggaacatgcatagccctcagttcacgtaacagcagtgtctagaggaacatgcatagccctcagttcacataacaacagcgtctagaggaacatgcatagccctcagttcacgtaacagcagcgtctagaggaacatgcatagccctcagttcacgtaacagcagcgtctagaggaacatgcatagccctcagttcacgtaacaacagtgtctagaggaacatgcatagccctcagttcacgtaacagcagtgtctagaggaacatgcatagccctcagttcacgtaacagcagtgtctagaggaacatgcatagccctcagttcacataacagcagtgtctagaggaacatgcatagccctcagttcacataacaacagtgtctagaggaacatgcatagccctcagttcatgtaacaacagtgtctagaggaacatgcatagccctcagttcacataacaacagtgtctagaggaacatgcatagccctcagttcacataacaacagtgtctagaggaacatgcatagccctcagttcacgtaacagcagtgtctagaggaacatgtatagccctcagttcacgtaacaacagtgtctagaggaacatgcatagccctcagttcacataacaacagtgtctagaggaacatacatagccctcagttcacataacagcagtgtctagaggaacatgcatagccctcagttcacataacaacagtgtctagaggaacatgcatagccctcagttcacataacaacagtgtctagaggaacatgcatagccctcagttcacgtaacagcagtgctagaggaacatgcatagccctcagttcacataacaacagtgtctagaggaacatgcatagccctcagttcacataacagcagtgtctagaggaacatgcatagccctcagttcacataacaacagcgtctggaggaacatgcatagccctcagttcacataacaacagtgtctggaggaacatgcatagccctcagtttacataacagcagcgtctagaggaacatgcatagccctcagttcacgtaacaacagtgtctagaggaacatgcatagccctcagttcacataacagtgtctagaggaacatgcatagccctcagttcacataacaacagtgtctagaggaacatgtatagccctcagttcacgtaacaacagtgtctagaggaacatgcatagccctcagttcacataacaacagtgtctagaggaacatgcataaccctcagttcacataacagtgtctagaggaacatgcatagccctcagttcacataacaacagtgtctagaggaacatgcatagccctcagttcacataacaacagtgtctggaggaacatgcatagccctcagttcacgtaacagcagtgctagaggaacatgcatagccctcagttcacgtaacaacagtgtctagaggaacatgcatagccctcagttcacataacagcagtgtctagaggaacatgcatagccctcagttcacataacaacagtgtctggaggaacatgcatagccctcagttcacataacaacagtgtctagaggaacatgcatagccctcagttcacataacagcagcgtctagaggaacatgcatagccctcagttcacgtaacaacagtgtctagagcaacatgcatagccctcagttcacataacagtgtctagaggaacatgcatagccctcagttcacataacaacagtgtctagaggaacatgcatagccctcagttcacataacaacagcgtctagaggaacatgcatagccctcagttcacgtaacaacagtgtctagaggaacatgcatagccctcagttcacgtaacagcagtgtctagaggaacatgtatagccctcagttcacgtaacaacagtgtctagaggaacatgcatagccctcagttcacgtaacagcagtgtctagaggaacatgcatagccctcagttcacgtaacagcagtgtctagaggaacatgtatagccctcagttcacgtaacaacagtgtctagaggaacatgcatagccctcagttcacgtaacagcagtgctagaggaacatgcatagccctcagttcacataacaacagtgtctagaggaacatgcatagccctcagttcacataacagcagtgtctagaggaacatgcatagccctcagttcacataacaacagcgtctagaggaacatgcatagccctcagttcacataacaacagtgtctagaggaacatgcatagccctcagttcacataacagcagcatctagaggaacatgcatagccctcagttcacgtaacaacagcatctagaggaacatgcatagccctcagttcacataacagtgtctagaggaacatgcatagccctcagttcacataacaacagtgtctagaggaacatgcatagccctcagttcacataacaacagcgtctagaggaacatgcatagccctcagttcacgtaacaacagtgtctagaggaacatgcatagccctcagttcacataatagcagtgtctagaggaacatgtatagccctcagttcacataacaacagtgtctagaggaacatgcatagccctcagttcacataacaacagtgtctagaggaacatgcataaccctcagttcacataacagtgtctagaggaacatgcatagccctcagttcacataacaacagtgtctagaggaacatgcatatccctcagttcacataacaacagtgtctggaggaacatgcatagccctcagttcacgtaacagcagtgctagaggaacatgcatagccctcagttcacgtaacaacagtgtctagaggaacatgcatagccctcagttcacataacagcagcgtctagaggaacatgcatagccctcagttcacataacaacagtgtctggaggaacatgcatagccctcagttcacataacaacagtgtctagaggaacatgcatagccctcagttcacataacagcagcgtctagaggaacatgcatagccctcagttcacgtaacaacagtgtctagaggaaggcaccacgggaggagcatccctgtgagtggaggaagggcctggagcggtttggtcagcttggtctgttttcctcacctctcaggttcagcttaggcctcaccacccctgggaagcttctctgacacccacgcccaccacagtcttggttgggtgccctgtccccagatcctgtggctttttgttcacctgtggctttgcttaaatggtactgaattgtaattgcattgtcagactcctctcttccccactggaatttgaactccagggacagcgctattttcttctgttccatgttcctcatattcgacacgtagaaaacaggtggttagggcccagcatggtggtttacaccggtaatcccagtactttgggaggctgagacgggtgggtcacttgaggccaggagttcaagaccagcctggccaacatcatgaagccccgtctctatgaaaaatacaaaagttagccgggtgtggtggtgggtgcctgtaatcccagccacatgggaggctgaggcaaaagaattgtgtgaacccgggaggtggaggttgcagtgagccgagatcacgccactgcactccagcctgggcaacagagtgagtgggactccatctcaaaaaaaaaaaggcacttagtaaacaaacaattattgaagaaaacataaccagatggcctctctgaggatcctttcaactcaagcatctccctttgaacaggggaaagcaagatcaccattacagccccaggagtgttcagggctgggggatgtcctaggacagagggtccaactggtggtacatctgcccagagggcttcctcgccagcacagctgtccccctcctgaacggctgggccctgcccacagtgcccgcccaggagcatcctgcgtgcctgtttcccacccgcccctgggaggcttgctgcctccccgttgccccagctgtgcagacgtggccttgtgcccagtcgagtcaacagtcaacactcagtgagccccactggctgtgctgcctggggtgtgccgggtgcctcatgtatatccctgtccagtggaggaagcagacacgccccttgctgaccacagagtgtggtacatgtgagtcactggagaggcacaggtgccgtcctctgagtcacagaagaagcagtgatttgttttttgttttttgtttttttttgagatggagtctcactttgtcactgtcgcccaggctggagtgcagtggcacaatctcggctcactgcaacctccacctcccgggttcaagcaattcttctacctcagcctcctgagtagctgggaataaaggcgtccgccaccacgcctggctaattttttgtatttttagtagagacggggtttcaccgtgttagccaggctggtctcaaactcctgacctcatgatccacccgccccggcctcccaaagtgctgggatgacaggtgtgagccaccgtgctcagccttgttctcttgataataattttttaaattttcatgttttttctaatccccaatataatactggctggttttaatgagaaatgctcgtagtaccagcatgtacagggtaaagctggtcgccactcacctcccactgctgacagtttgaggtgtattcttctgaactcttctttgcttatgctggtgtgcgcccgcgtgtccaatgagactagactacacgtgctgttttgcaacttcagcattttactccacagtgggtctttgagccctttggatgtatcagattctttttctttctttttgaggtagagtctcgctctgtcacccaggctggagtgcactggtgagatttgggctcactggaacttccacctcccgggttcaagcgattctcgtgcctcagcctcccgagtagctgggattacaggcgcccgccaccacgcccggtagtttttgcatttttagtagagacggagtttcaccacgttggccagggtggtctcgaactcctgacctcaaacgatccgcccacctcggcctcccaaagtgctgggattacaggcgtgagccaccgcgcctggcagtatcagattctttttaacaactgcctcctgctctgtcgcttggctgcatacaaatgtttttgggtgtttggattgtctctgattcttcgctcttagcaggcaagtcaacagtaaacatcactgcgcaggtgcctctgcagtaggttccctccaggtgggatgggcagggcagggtgagtgtgcgcttaattgacaggcttttacctctgaaaaagctgtgactggtggcattccccctgcggtgtgtgagggtgactgtcccccacagtgtcacaacactggctgtgaacattctttacaattttgccagtccagtgggttaaaaagaacaaaacaccatagaggtgaattctaactgaggagcttgaggatggccttgggagctgagacttgaagcataatggtggttaataaaagggagggggtcctttacgaaacagacagaaacttggaacattgagggagcaggctctgcccgcagaggatgaatgtctggtgagagggggaggctgagccgacgggacctggtgggttgtctgccgggcagggaggctggaaccctgccatgggggccttggtgccaggctagcaggtggggcttcaggctgaaaggtgtctgaggtttctttaagcaggtgtctctgttgtacccaggatttaatgtgtagaggcagcagagtgacagtacagagaggttaatactactgtaatatttgtattatttagggttctcaagagaaggaggcatagcaccccgcccagggccacgtggagaggtgccagctttgaacaggaggcaggaatggaaagaaagtgtggccacagcttttctgtggagaaacagggcagggaaagggcttggcaccagctggcttccgttatgtcggcagccctgggctagaggagtggtctctggtgacctggtccctggccctgggtgacgtggggcagaggagatgctggcttggcgagtgagcgtcaggtagagaaggtggttggggacatgggctctggatcagtgggtgtgtgtatgaaagctgtgctcatagggcatcactgacaggcttaggaattagtgagccctgtgggggagcagtttctcacccagctacccgcctctcctgccacaagatgtcaaaacatcacgaaatacggaaaatgtaaagagcatgttaacacacagtggagtgtcgtgcttagtgctgctcgtgagaaaggcccgagtgtgaggggaaccctctgtgtccccatctcctgcagaaagccaacaaaggccagagccgggccatcgagcgcctgaagaagaagatgtttgagaatgagttcctgctgctgctcaactcccccacaatcccgttcaggatccacaatcggaatggaaaggtcaggatgggtgggggtgggaccaagacagccccttccttagtccagagcagcccactctgtggctcctggccctgacctgtacgaaccggaaactcaggccccctcttcctgaggaggctgccatggctccagctgttgactcgctctcccctctcgtgtggaatgagtgccctctgctggccgtccctggcacagccgctcctgtcaccttggcttcccaggaaggagctcccccttcacccacccacccccagctgcctcctcctgcaaggtcagctgtgcctggataaggaggagctttgggccgggcacagtggctcatgcctgtcatcccagcactttgggaggctgaggcaggcgaatcacctgaggtcaagagtttgagaccagcctggccaacatggcaaaactctgtctctactaaaaacacaaaaattagccgggcgtggtggtgggcacctgtaatcccagctactcaggaggctgaggcaggagattggcgtgaacccgggaggtggaggttgcagtgagccgagattttgccattgcactagagcctgggcaacaagagcgagactctgtctcaaaaaaaaaaaaaaaaaaaagataaaaggagctttgttggggtccccaggatctgggagtacgctttgcctgactgtggtcacccactttatgcttatctcctctcttcagagttacctgttcctactgtcctcggactacgagaggtcagagtggagagaagcaattcagaaactacagaagaagggtaaattcctgcctcttccacgctccccaatgatgtccgtggcattgatgggccttttgtatttctaagcgtttcatgtccagtatcacgtctttggccctcgcagtcaccctcagaggtgccagggtgagcgtttaaggatgttacggattaattgagacccaaagaatctaactgattggctgaaagacatgatgatttagtcctgggactggacccagagcccagcctgggctttctctctctctctacctctctctctctctcacacacacacacacagagacacacacacacacacacacacacacatacacacatacacagaggctgggtacggtggcttacgcctgtaatcccagtcaggagtttgagatcagcctgggcaacgtggtgaaaccccgtctctactaaaaacacaaaaattagccaggtgtggtggtgggcacctgtaatcccagctactcaggaggctgaagcaggagaatcccttgaacctgagaggcggaggttgcagtgagctgagatcacagcactgcactccagcctgggcgacagagtgagactccgtttaaaaaaaaaacgaaaacaaaacgcatacaccacacacacacacacacacacacacacacacacacacacacacacacacacacacacaaacctcttcagttagattctcctactctgacccctctcgcagcatctacaccagtcctgctgtgtccacaaatccttccccctccctcgcaaggaccaagtctgccccagggattaagccgtcttcctgcagcagcccccagggaagagcagccggtcctggtggaccagtgcccacgctcccttctctctcggctctccctccagatctccaggcctttgtcctgagctcagtggagctccaggtgctcacaggatcctgtttcaagcttaggactgtacacaacattcctgtcaccagcaataaagacggtaagctcgggaaccagaggtggcccaaccggcaggtcccagccctcagagcgtggccggcttcccgtaaggactcagacagacatgtggctgtaaatggctgatccctgctcggctgtgctgagactgttgagtggccaggacacagcttgggtaggggtgactgtctactgagttcccagatgaccccagcttttccttgggcccctctgtctggcttgggagaactggcaccctggtgcactgagattgtgctgttaatatattcatgagagagcagacccggtagataaaatggtgtatgggaaatgaggctggaagtttccagggaccagctcttgaaaggccttgaatcccaagcaagggagtttggaattcatgctgtaagcccgggagtctgggggggttttgagcagtggggagctgtgatcagggctgggaactgaccggagtgggtgtattctagctgcctgtgtgctgggaaagggtccactttgtgaacggggtcctgaaggcaagctttcctcgacataaatcattagcagaatgatttatcatattggtcagttttcagtgccaggataggcaggatttggagggagagacagtacccatggggaatggtactaagtccctgggccaggatggtgggtgtgctggacccccccaggctgagtggaggagagaaggaccccctagccctaccccgggcagctcacatataaggccgccgtggccttcggaaactttttcatctggccaccaggtggtgatgttggaccaagactcagctgagtctcataccccgtctgcctcccgccggcctggggtggaggctgaggggatccgctgaccaccctctgccctgggggcttttctctcttgcagacgatgagtctccaggactctatggcttccttcatgtcatcgtccactctgccaagggatttaagcaatcagccagtaagtgccctggccaggacgaggttgggtgggccattgtggattctgcactgctctgcccaggatggggccctgccagcacgcctttagacatggggcattcccctggaggccagaaaccagctcctcttggcagggaggtcacccctggcctttgtctccaaagtcctctttctcaagccctccctgaagctgtctgaaacctaggggccgggcgcggtggctcacccctgtaatcccagcactttgggaggcccaggcgggcggatcacgaggtcaggagttcgagaccatccgggccaacatggtgaaaccccgtctctactaaaaatactaaaattagcgtgggcatggcggtggacgcctgtagtcccagctacttgggaggctgaggccagagaatcccttgaacccgggaggcggaggttgctgtgagctgagatcatggcattgcactccaccctgggcgacagagcgagaatccgtctcaaaaaaaaaaaaaagaaaccgagtgcgacaaacacgtggactccaacttcatatctgagggcgacaaacacgtggactccaacttcatatctgcccatgacaagctgtgtgaccttgggcaagtttcttaacctctctgggcctccactaaaaggcagtcacgcttgtgaattttgacccgagagcaggctgggatatgatcgtgtgtgtgcaacgctggtgtgctgccacgctcatcgctttttctccccttcccccttgtgggttcctcatactaaatctgtttttagtgtctcacaaagtaggattgcactttttaatttttaaaaaatttttttttagagacaggttctccccatgttggccaggctggtcttgaactcctgggctcaagccatcctcccacctcagcctcccaaagtgctgagattacaggcgtgagctgctgcgcccggcctggttgcgctttttatctacctgttatccacacgggaatctgtgagtcagttagacagctaatagtttctacccatttgccagaggaggtaaccgagtcacagagaggagaaaagacttaacatcacagaggatcagaaaccctgactctctccctctccacctgcccctcccactccctgctcttcactggcaggtggggtctgccctcacccctccctgcagcgccccacacagaggtgactccccgggccgttagagcagcctttcccaggaagcctccctgagttcctgggggcaaactggcctcccttctttgtcccttctttgtgcccacatcccctcaggttccttgtgcccccatcccctcaggttccttgtgcccccatcccctgaggttccttgtgcccccatcccctcaggttccttgtgcccccatcccctgaggttccttgtgcccacatcccctgaggttccttgtgcccccatcccctcaggttccttgtgcccccatcccctcaggttctttgtgcccccgtcccctcaggttctttgtgcccccatcccctgaggttccttgtatccccatccctttgaggttccttgtgcccccatcccctgaggttccttgtgcccccatcctgctcagggcaagctggttatggcacctgtcatgctgttttgtcacttaacaatttgcgtctcccactgtgagttctctgagggcgggaaccaggtctcctttaccctgggatgcatgggagctcagaaatgtggaatgaagtcgttaatttacacagcacctaccgtgcacctggagaaggtgagaacatggctggcgtgtggacgtactcacatgtgcaaagcctgtggcgtgttcagagcctctcagtctcacggtccgctctgagcctccggcatcccgccgaggtcacggaaaccatccctgttttacacacgaggacgccgaggctcggaggggctcaaggttccttcctggagtcacacagtagcaggtggtgcagcagaatccacgtcttccggcaccagagccggagctctaaccttttgggcacttctcgatgtctggccgggaacaccacacggtccctcaggctgcttgttaccgtggaagcttcctgaactctctccagacccacagacctcccttcttgggggctgccgctgaggagcttctggctagtgagctctgaagcactgtcccacccatgtctggaccaggcgccaccactccatgtccccagatgccgcccctccctctcctgcttcccgttggccgggaggtcctcgcctcagggagccgacccgtggcctcccagcctgggcgggtgtcagagccggctgagctgctccaaaatctctctttacccccagattatcctcactcccttcgccgccgccacccctgacccactcatatgtctgttctcactcagaggtgaggccctgtgtcttcagccgtggtaaactcaggacctctggacaggcaggcccagggtgtaggcaccatgacttttcctgctgtgcagacaggaacctggggagagaagggaggtgatctgtgcagagctggggtgtggacccagatggtctgactccggaaccctcgctctgaccctgtgagccgtccccagctccttccggaaccctccctctgaccctgtgaaccctcccccagcccgttccggaaccctccctctgaccctgtgagccctcccccagccccttctcgaaccctccctctgaccctgtgaaccctcccccagccccttccggaaccctccctctgaccctgtgaaccctcccccagccccttccggaaccctccctctgaccctgtgagccctcccccagccccttccggaaccctccctctgaccctgtgacccctcccccagccccttccggaaccctccctctgaccctgtgacccctcccccagccccttccggaaccctccctctgaccctgtgacccctcccccagccccttccggaaccctccctctgaccctgtgaaccctcccccagccccttccggaaccctccctctgaccctgtgagccctcccccagccccttccggaaccctcgctctgaccctgtgacccctcccccagccccttccggaaccctccctctgaccctgtgagccctcccccagccccttcctgaaccctccctctgaccctgtgacccctcccccagccccttccggaaccctccctctgaccctgtgaaccctcccccagccccttccggaaccctccctctgaccctgtgaaccctcccccagccccttccggaaccctccctctgaccctgtgagccgtcccccagccccttccggaaccctccctctgaccctgtgaaccctcccccagccccttccggaaccctccctctgaccctgtgacccctcccccagccccttccggaaccctccctctgaccctgtgacccctcccccagccccttccggaaccctccctctgaccctgtgacccctcccccagccccttccggcaccctccctctgaccctgtgaaccctcccccagccccttccggaaccctccctctgaccctgtgagccctcccccagccccttccggaaccctccctctgaccctgtgaaccctcccccagccccttccggaaccctccctctgaccctgtgagccctcccccagccccttccggaaccctccctctgaccctgtgagccctccccagcccctcgaggaggggctcacaccgagatcaatccatgatgacagcacttcatggcccgtctcaaacacacaggcccactccctggtctggcccaggctggggtgctcagggcctctgtgttgttcacctgcaaatccccagccccgttctgtgtgttctgaggcccacctgggtcttctttctgttgctccagctggaggcttcttggggtagctgcactgtcctttctgcaggaaagctggtttttttggtttttttttttttgagaaagagtcacttggtcgcccaggctggagtgcagtggtgccatctcagctcactgcaacttccacaccccaggttcaagcgattgtcctgcctcagcctcccgagtagctgggactacaggcatgtgccaccacgccgggctcacttttgtatttttagtagagatggggtttcaccatgttggtcaggctggtctcaaactcctgacctcaggtgatctgcccaccttggcctcccaaagtgctgggatttacaggcgtgagccaccttgcccggccaggaaagctgttctgatggagaatggcccagctgggcagctgcaggggctaagtggagtaagccacctgcactgtatgcccgcactgtgacctctgacgttgtttcacgctgcagagggttggccatagtgtcccaaaggcacctcccacaccacctctggtaccctgggaacaacctcggcatctccctggaggtgggaggactgctggggtccgagcccagggcgggtgtgggtttgcagagggcctggggtccgtgccggtgctgtggcctcagcagttgggtcccaaggtagattttcagcctgaaggccagggtggaagatggaaatgccggggaaagcccccggccctgccctcccgccccagccctccactgccttgttacctggagcgcttggtggtggtgggagcctcgttcaccgtgtgccagctgggttcccagccctgttcttggtactgcgggtacaccggcaggcaggaaaacccaggcttctctccacatggtgtttacgtcgtggggggagagagactagggacgcacgagtagagaagatccctttggtttatgttaagtgcagcggaggaaaccacagcaccctgggcttggggatgtgggcgttgttggtcgtcaccgcggcaggggatgctccgagcattcaggacccagaggcagggctgctaaacgcctcccaccccaaatgccgctgttgaggcctgggcacccatgttacggggagaggtggctccagggcggtcagtgaagagtttgtggtgtcgtctccatggtgaggaagatgtggagacggaacagtcaagggccctttagagggaggaggaggccagagtgtggggagggccgaggtgggaagggcagagtgtggggagggccgaggtgggaagggcagagtgtggggagggctgaggtaggaagggcagagtgtggggtgagccgaggtggggagggctgagcccctaagaagggggcaggggagaagccagatggtcccgggcttcagggaggagagagccaagatgccatccgtggggacgttggaaaggacagatgcgatgtccccctccatcctgagtgccgccccagctgccccaccctggccccactcactcagtatctccgtctgtccttcccccacagacctgtactgtaccctggaggtggattccttcggctattttgtcagcaaagccaaaaccagggtgttccgggacacagcggagcccaagtgggatgaggtgagtggcaggggctggcatctctgtggggaccccaccaccccgtgctcgtggcttgtctgctggggacggccagcccattggttggaccagctatgtctgcacccccctttctgctccctgctcctctggcttctgatcgcggtgtgtgtctgggtgtcagaccctgtggtgtcagctcaggcccccagactccaggggtgatgggaggcctctgggagctccagaaaatctgacgtgtccttcgtgggccgtgcttactccctcctccttgcaaagctgaggcacgcacctgccggaaagccaggcctcccagcttcggaggttcagggccctttgtcccatctttccccaggagtttgagatcgagctggagggctcccagtccctgaggatcctgtgctatgagaagtgctatgacaagaccaaggtcaacaaggacaacaatgagatcgtggacaagatcatgggcaaaggacagatccaggtgaggccagggcgccggggcgaggctgagggagcctccaggaggtggttccagttgaaaaggaattctggtcaaggagcctgctctttcgtgattttggttccaagctggttggaggaaagttcccaggaggtggttctcccctccctgctagaggtggctgcctgttgtggccccggaagcccaggcgtgtgcgtggctcctcaggtgggtcatctgcgcttctgcaagatggaaacaaccagctttgttttcacacgccagctttagtctatgggtggttgtttcccggaacgccatgttgagaaggactcagaggctgcgtcggtgaacgggagggaggaatgctgtgtgtgaggagccgtgtctgccattgacgggggaccggagttaggcacacggaccaggcgtttgctcttctgcccgaaagacttagggtcctgctggttggcttggggggaggggggtctctgacttgttgttagggtggccggaccttactcagctgcgttgggagtctgtggcttcgggtggggactctgggtgttagtagaggctgcacctcgggttaagggtatttatgcttctgggtgcggtggctcacgcctgtaatcccagcaccttgggaggccgaggtgggtggatcacgaggtcaggagttcgagaccagcctggccaacatggcgaaaccccatctctactaaaaatacaaaaattagcaggtcgtggtggcgggcgcctgtaatcccagctactcagtaggctgaggcaggagaatcgcttgaacccaggaggtagaggttgcagtgagctgagatcgcgcctgggtgatggagtcagaccgtgtctccaaaaaaataaaaataaataaaaacagcatttatgcctcaactgtgcttttggctccctataaacatatatagggaaaaggcctctgtgtgtgcagcctgtgtctctgaaacattctgccaattttgaagatggctgctattcaccaacctattaagagaagtaggcttgggagcgggaaaaggcgtgacgtggtggagccgctcacactcccgtctggtacctcgtgtggcctcgtgctgtgccgcaagtggtctggtttgggggtagattctgtgaccatgaaatgaagggagacggtaactgacccgtactgaggttgagcctcgggcgttgggcgtgctgagcttcttgacagtggccgcagacgtgatccaggcacagctgggcgccgagcttcttgaccgtggccccggacgtgatccaggcgcagctgggcgccgagcttcttgaccgtggccccggacgtgatccaggcgcagctgggcgccgagcttcttgaccgtggccccggaggtgatccaggcggcagctgggcgccgagcttcttgaccgtggccccggacgtgatccaggcgcagctgggcgccgagcttcttgaccgtggccccggacgtgatccaggcgcagctgggcgccgagcttcttgaccgtggcccaagaggtgatccaggcgcaggctgcgatggctccgtctacaacagggagctgaacgatgctttttagcaggaagcatttgttctctgatgcattgtcatggccaccgagtttggtatctggctcttacctgcaggtccttggtagcattgcccctggggagctgtgtgggtctcccactcgctgccccatctcaggctccagtgtttgaaccaggggccccacgtggaggggcctggcctctgccgcatacgccccgtgttcctaaacacgtctctttccgatgctgtggggtctgcaccctgcttctcagtactcgtcactagggagacagggctgccaggcaactgccagccagtccttcgtgatttaggaaatgggctctagagattcagtccctgggacctgctctctgtggggataaggggagggagccccatctccctgtccctgggctgggctagagggacaggcacggaagggttctgggctggcctgtgcagccccaggagacgcccaggcaagagacgagtggtcgccacgccacactccctgggccactggtggctgtggaatagaagagttacaaggatgtgccgggcagccagccccgtgggcacggtgggccccagcccctcgagaactcagctcccaaggcccgagggcacattcccccacctggacttcagccccattgcttccctccttctcactcagctgcacaagccccgggggaaacacaccatcagtcactgcaagcctcttggagacaggagcagatggaggcagtgggggagggaggaagccaggttatgtttggcaaagcagaaggcagagtctggtaaggaaaatgtttctgtgtttaagcttcgaggaatgttaaatgcctgggagttgatattaaaagaaacataaaccttcctgctgccagctgacctgggcctgtgagcggacagttcagagccagagtcccctgcaggcctttgaagtcccccagcactcagcatgccaaggcccggccctggccctccgctgcagaaccatctcaccagcctgcctttggtgggggaggcatgccccaggggcgggctgtggcttagaaagtctcgccccgtgactgccctcagagccaccgtggatggccaggctgggtgacgagtccacacggagctgttcccacgaacccgggccccacggagccacggaacggtctgtccccacagcttgtctctgccttcactccggccacacatctaaggaagggagctggcactagcctctggaatgcagtctttctgcccgccagcaggcgctgaggacatagtcggaggtggctttgagatagggcccagccctcggggatattcagggggcctgtaggaaaggcaggaggaggagggcagtctctgaggcccccacttctctctaagccccctcccagcagcccatccagagaaagcaaggggccctacggcctaagcgcaggcatttgctgctgtgatgaggcccccactctgggtcgcctgatggggcagtggggcaggagtctcagcggcggggtggggtgggggaagcatttagtgacagacagacggcagcatgcgtcaccaatgtgtgtccagcacttgtgctcctggaggccgcttcccaaatgccatctcctcgtgtgatccttgtcgtgatcctccagggagaatgacagtccctcctccccatcttacagatgaggacactggggtactgaggttaagtaccttggccaaggcatctctgcgtatggtatgtgggaaaggccatgttccctcctctgtgccatgtccccacgtctcaggcctttgtcaacgaatcccccagcccggacagagggccgtggcatggctaatggcctggagaagcagctgaggtgctgctttatggcataaggtgagcgtcctttgtcttggagtcctctgggcaggggacacttgtgcctggtgcccctgggaggaaggagaggagcacgtgcgggaaagagcaggaggccgaggtgggctgatcacgaggtcaggagttcgagaccagcctggccaacatggcaaaacccctttcctactaaaaatacaaaaattagccaggcgtggtggcacgcgcccataatcccagcactttgggaggccgaggcgggcggattacaaggtcgggagttcaagacccgcctggccaacatggcgaaaccctgtttctactaaaaatacaagaattagctgggtgtggggcccacgcctgtaatcccagcactttgggaggccgaggcgggcggattaggaggtcgggagtttgagactcgcctggccaacatggcgaaaccccgtctctactagaaatataaaaattagccaggggtggtcgtgcgtgcctgtaatcccagcacttcgggaggccagggcggggggatcacctgaggtcaggagttcgaaaccagcctggtcaacgtggtgaaaccctgtgtctactaaaaaaacaaaaattagccaggcgtgatggcgggcacctgtaatcccagctacttgggaggctgagggaggagaatcacttgaacctgggaggtggaggttgtagtgagctgagattgctccattgcactccagcctggacaagacagaatgagattctgtctggggaaaaaaaagaaaagaaaacagcaggaggggtacttagcatgcgtctgtgaggtccccagcccaggagggggtcctggcctccagggacccactgtcagattggaaagacgagtatattggtccatgttctccagtgagaagaatgctagatgtcagccacaatagccgtacacacataagcgagcccaggacgagcccagcacggtgctaaatgcttccatctgctgtctcaggagatcttcccaggaccctgtgggagaggaatatcatcacagctagaaagatgaggaagctggggctaaggagcccggacaaggccatgtgcccaggagtgggccagggcgggcagctggctgcagagcccatttctagatgtcctgctgcctcctgctataagaagacggaagattgtcctgctgtaagaagacggaagattgtcctgctgtaagaagacggaagattgtcctgctgtaagaagacggaagattgtcctgctgtaagaagacggaagattgtcctgctgtaagaagatggaagattgtcctgctataagaagatggaagattgtcccgcaggaattcagaggcagaaaggtcaccatgggctggaattagggaggcttcaaggaggaggtggaacgagagcgatttggaagccctgggttttttaattccaaaagcaatgtttgtatgagaaagaaaattgcagtagaagcaaagagacttgaaacctaatcagaaaccatccttcctccggctcctccgaagcagccagtttattctgtgccttttcccttcttgaggtatacacatttttatgtagatttaatcagggcctgttttgtctgtttttctgttttcatggattattataaacctccttttctctagagctgtatggagtcttcttaagcacctttttggatactttgttaaaagtactttatattctttgtagaaatcttggtatagagcggccagcgcaattgctatgctaaggctctgtgttattccagcaaggtgcgcaggctccgcttccgcagaagggagtagggtgggagttctggaggacagacccgcctggcagggaggcacgaatgtgaagggagggtcccaggaaagtcaggagcctcagcaggggtggcggggagctgcaagcaaggccagtagaaggaatgaataaaaggaggggattcctgggggtttggccggaagaggtattttttttttttttgagatggggtcttgctgtgctgcccaggctggagtgcaatggcgcaatcttggctcactgcaacctctgcctcccaggttcacgccattctcctgtcccagcctcccgagtagctgggattacaggcgcccaccaccatgcccagctgatttttattagtagtagtagagacagggtttcaccatgttgaccaggctggtctcaaactcctgagctcaggtgatctgtccacctcagcctcccaaagtgctgggattacaggcctgagccacggcacccggcctggaataaatcttagagggcgtttaatccaatcctgttttccggagagaaggaaatggacaccagcaagggtgagcgaggcagccgcggtcacagagcttgttagtgggtgaacaagggccccagactcagggaccccatccaggtccgcttagctgggagccccccctccaccggctcttgcccctgcccccggcgtagtctgccctggctcctggtcccaggggactccactgtgtttatcctactctatttccagccttgccgctccagctgcaacctacccgctagctgattagcatattcccagggtccggcccttcttggcgggctgggcctgaggagagcgctttcccttggggccccacagctcagtttctgccagcgtccccagactggagaagggcctgagaccaagaagctacttaaacctgaggggccctctgcaccccctgcccgccccccggccctgcgtcattccctcgctcaccgcaggctggggacagcccccaccccacagtccacctctgctccctgtgcctgggaggcagctccacttccccacgtgcctgccagggcagcccctccctgggcacagcagcgctgaagaccctgtggtgggaggggcaggttccaggccaggaagggagtgtgagccaccgcgtccggcctttattctttttaaagaaaaaatagtggtagaagccaggcatagtagctcacgtggtgtagctgtggactacttgggaggctaaggaggctagagtgagctaaggattgcgctactgtactccagcctgggtgacagagcaagagtctatctccactgaaaaaaataaaaaataaaagattgtagtgaaatatacataacataaagttaccattttaataaattttaggggccgggcgcggtggctcacgcctgtaatcccagcactttgggaggccgaggtagatggatcacctgaggtcaggagttcaagaccagcctggccaacatggtgagaccccatctctacaaagattaaaaaaaattagccgggcgtggtggtgcacgcctgtagtcccagctattcgggacactgaggctggagaattgcttgaacctgggaggcagaggttgcagtgagccaagatcatgccactgcactccagcctgggcaatagagtgagactccatctcaaaaaataataatttttgggtgcacagctccgtggccataggtggatttggtgctgtgcagccgttgccagtgtgcatatccagaacttgttggccctccccagccgaaaccccatccccattaaatcataactccccactcctgcacccttagcctccagtaaccacctgcctgctttctgtctgtacgaatttgtccagtctgggaaccttacgtaggtggaatcagacagcatttgtcctcctcatgtccttgagcttcacccatatgccgttgtgtgtctgaatttcctccctttctgaggctggatacaatttccctggatgtagatgccacgtctctttatctgcccgtccgtccgtggatgtaggtgccacgtctgtttatccgtctgtggatataggtgccacatctgtttatccatccatccgtccgtgaatgtaggtgccatgtctgtttatccatccatccatccgtggatgtaggtgccacgtctatttatccatccatctgtggatgtaggtgccacgtctgtttgtccttctgtctgtccgtggatgtaggtgccacgtctcttcgtccatccatccgtctgtggacgtaggtgccatgtctgtttacccatccatccgtccatggatgtaggtgccacatctgtttatccatccgtccgtggatgtaggtgccatatctgtttgtccacccacccgtggatgtagctgccacgtctgtttatccgcctgtccatctgtggatgtagctgccatgtctatttatccatccgtccgtggatgtaggtgccacgtctgtttatccatccgttcgtggatgtaggtgccacgtctgtttattcatccgtttgtggatgtagctgccacgtctgtttatccatccatccgcggatgtaggtgccacgtctgtttatccatccattcatggatgtaggtgccatgtctgtttatccgtccgtccgtggatgtaggtgccatgtctgtttatccgtctgtccgtccgtccatccgtgcacatttgggttgtttccacccaaaacgctcttgcctttcgttgagaaaaagaaccttgtccctgaggatggagacagcacagcctccttctctccagacccaagctctgtcccccacctgcctcccagctgtaatagatgagcaggacccgtgaccctagggcatgactggtcactattagtctcctgtagttgaagcacacagttgggccccctgcctcggccttctctccccctcccggccaagtgtccctgccccttgaccccttcacccttcttcctgggtcagctctttcctcccctggtcagtggtttaggtgcatcgaatgcagacgcagtcaccctgaggccgcgggaacaacctctggtcccttgacttcttggcatctcagtttcttcttttatttatttacttatttatatttatttgagatggagtctctctctgtcgcccaggctgagtgtaatggcgcagtcttggctcactgcaacctccgtctcccgggttcaagtgattctcctgtctcagtctcctggttagctgggattaaaggcgcccgccaccatgcccagctaattttcgtatttttagtagagacggggttttgccatgttggccaggctggtctcgaactcctgaccttgtgatccacccgcctcagcctcccaaagtgctgggatgacaggcgtgagccaccgcacccggccaagtttctttattgattcagtgggggtaactattcctaccccaccttcagcactggcttaaaggatctcacatacctggaagagccagtcggtgctgtgacgtgtgcgtccacgctttcacctgttcactcacttgtttctgtttacgatacatcctctgaatggcaggccctgggctgtgggtacaaagaatgaccaggacctcaccgtctggtaaagaaaacaagagaacttaggccaggcacggtggttcatgcctgtaatcccagcactttaggaggccgaggcgggcggatcatgaggtcaggagttcgagaccagcctggccaacatggtgaaacgccgtctctactaaaaatagaaaaatcagccgggcgtgatggtgcgctcctgtaatcccagctactcgggaggctgaggcaggagaatggtgtgaaccaggacccaggaggtggaggttgcggtgagccgagattgcgccattacactccagcctgggctacagagcgagactctgtctcaaaaaaaggaaaacgagaacttggatcgttagccagtgttgccggggttttgaggccagacagatcttgcggggctgagtctagctttctccatcgttagttgggagaacagagcgagtatctttgcctctgagcctcagcttcctgacctgtcagatgggctgtaagaggactgaatgtgagggtccatgaaaccctggacccggggcctggcatggagtcagtacgtggtttgccctaagctggcgggttcaggcaccctgtcccccacccccttccagtggttctgggtgtcacttgtccagcagccccctcctaaaggctgtcacctataagtggtcccctgggtcggggcctttggctggccgaggcagcattattttcttaagctgatggggtcagactggctttgctgaaccaacctcatagcaggggcggggaagtcaaggctggggccctcaatgccggctggcccgaggtttccctgccatgacccagcacggcagctctgagcttggcctggtgtggtcggaaacaaggggcctttgtcagcggctggggagcagcttctggtttcaattactctggagagcacgaggaagcttgcagagaacgtggggccggagcccgccagggcaggagtcaagggctcccctgccccacttccctccctctgacccccaaggggtgtcttgtccccattcgaccctgcctgagggtcctgcgcgtgcgtcctgggggccctgggttgtgagcccagagccccttccagctccggccccctctcgttcttcatagtggtactgggacccctcccaggaagatgatcgacggccggtaacgtgggtcctcagtgcttccccgttccaggcctcacgcgtgggccacactgaccacagccgggcccctggccctgagggaggccttgattcaactgggaaggaacacaggcctttccctttggttccatctctcccgtccccaacccctgccctggcactcacagcccccatagctccctgtcgtgggacaccggagtgacctctccctggaagatcagcccgcgtcggcgcccgccaaggccaggagtgcatgtcaggccccgcctcggctcctggcttaggagttccgcctccctgctgcttgccaccctcacagctggcccacgtggggctcttccctctgccgccacccccacccctgtgccagttccccaggcacatagggaccgtggaggctgagccccaggcctggttctacttcctgctgactctccacttcctcccagggccccgtgactgcagccattgtcctgctctggccctgcccaccccagctgtttcgggcacatttgttctccagcccagactcccacctgctgtccctcttcaaggcaggtctagacgcctggttctccttggagagtgggcagcagagactgtcctgggtgggggaagtcgggggagggtccctcgagagtgcctgccctgccgtcgaaagcttttccaaacgtggggcacgaacctctctcgtcagccctgctcagctgcctccatcgcccaggtgttcctgattttgggagcctggactctgcccagtggattctgggcaggaagcatccagcaggaagcagatggaggtgtgagtcggctccccccgctcccctccacccctgggaagtgccgcctcagcaggcaggcttggcgcccgctccccctgacccgcctctgaagggtgggcaccatgcagagaagccggtccagacaggacctcaggagccgatgcagtcaggccctgagaacatccagcctcccgacagaccaaaaaaaggtgttctcagctctgggtgccgggctcccagactcagaggcacgggacctgggtttgatcttagccggccaacctcgggtgacccttcagagagtgtcctctcgggtccgtggcattcagcgaactcgccgaggcgaaagccgcagacatagattcctccccgtgagccgctaacctccctgctggcggaggctgctgcttcctcctaggaatccaaaggatcagctccagggttgtcccactttccgtgttttctgaaagcttcaagagaaggatgccacagaagggttgccagagaatttcttgagttagggctgaggctgcagatgaatgctgagcgggggtcacctttagggtgggctctgctggcctccctcaagcctgcggccaccgcagactcacagcagcccctcgtggccagccccgcccttgccgtggcctgggggcgtggacattggtggtgctgggcgagggtctaagccccagtgtagcctgtagctttgggctggggcagggagggatgggcacaccgtgttcacgccctcggaggcaagtgctgagctgccctggcttcaggaaagaccctagcgcggctggagacgcaagatgacccagacacacccgcctgacccactagacaggtgctgtcccctctcgaggctgccagggcgaacccacagccactgagcaaaagccctgagtttcccaaaggagggagagaagcagagacacgactggagctgcaggttcagcgtctgacccagaggtgtccttacaaagcccctaatctctcagacccccacgtcccccaccccgagggagagcgaggccttcgggagaactgcctctaggagctgctgggaacctaaggtttgagctgtagatgcctgaaaggagggcggggcgctgaggtgtgcctcagattctgcctgtggggcgtgggaattccggggagggacgtgagccccaaggcaggcgaggggtggtggaaaagcaggtgtgagccagtgggccccacgtcccctcttcagccagggcgcctgctctctctgcttctgcttttatccgacgaggtgggcagggagacgtcggcataaaatttcatttggaaaaaacggcaggggtgcgtcctcagcagaaaagaaatctcaccggagaccatgtgtctgttccgagctcctgatttgacagctgtggaaactgaacccagagaaaaacacagccgttgagtccacaggtccctggctcccagggctttgcttctggccaccatgagctcggagcttgggtggaagggaggtgttcgggaatccagaatgaagaaagagcagggaggctcggcgaccccatcccaccttcaggcctcagcccctcctgcctcaggctgcaatttatggctgtgctgggagacccggccacaccccctccttcccgggaggaggagcaggcaagcagcccaggggggctccagcggtagggacagcatactgaggggccacgccctgcccactctgtccctgggtgagttttgttctagataagcaagatgttcccaaaggctcaagtgcatttttcacccttttccatgaccaaatgtgctgtgagaatcgctagggtttgccagggacgggctgtcgggacacttctcctgcagcagacaagctcttgggctgtttcagcctctcctccgtacctagaaccaccgagcaccctggcgacaccagcctgacgtggccagagagaggctggaggtcaggcagagggaggctggagctgtgtgagaagcagcacgtactcgggactgccctatgagccggcacaggcctttggggagttgggaggacagcaggttaccttgggcaggcctaggtctgggccgtagagcaactgatttcatcctgactgccttcttccttacactgtgcccatcttcaaccttgagcccaccctggacccctctcccagccccacctggatggatgggtgggtgggtggatggatggatggatggatggaaggatgggtgggtgggtggatggatgggtggatggatggatggatgggtggatggatggaaggaaggaaggatggaaggaaggaaggatggaaggaaggaaagaaagaaacaaacatagctcctagggtctaatctgccattggctgctgggtgactcctgtccccaggctgaatgcaggctctgaacattgcaaatacccagaggtatccgatgggtggggagaaaaacctagagtgagtctcagtgtctcattctgggaagacatttggccttccagtccgcaggttttggttagggtcggtacaggaaatggtcagaacacacagtaagaatgcagtgaccacagagccaccgagttgggggacactcccgtccccactcccccacagctgtccccggaacgtgccatcctcccgcccaactcgcacgccctgtgtgggcgctgggcaccccgggctcccatgctcggcctgcttgtctctctctcatcctggagcctgcacctgtctttgggcaggagccactggcaggctctctgcagcccccaaagcctcgggtccgccctgctctcctccagcaccttcttgccccccagcctcgggtccgccctgctctcctccagcaccttcttgtcccccagctctggtcctctgatgcccagccggtgccctgatcctctggtgctgagagagggagtgttcttggcagacctgagccacatcccctcggtccccatcctcagctgggtgccaggctcctcctgggctctggactctctgggcggcctcttggggctctccccgccccaactggctcccaggctatccccactggggcgcctgtggccttggtctagctggctgctcagaaaccccctctcctggagtcatttgcgctagcggataggacgaggaatcggggttcaagtgtgggctgggggagaggagcgtcgttctggtgggaaaaaggaggtcactccaggaaagcggcagctgcatttctaggttctgaggcagaaccttcctcctggtgctcacaggctggaggatttgcctggaagccgtccccacccccagctgtcaccgaggcagccccactgcagcctttgcccctcccgctcgcacagggcaggatgtgaccttttttcctcgttgatgccgccactgaacaccttaacccgattttacctcagtcacagctgtgctgggtggcatgaccccctccctaggtgtaatgcggggtcccacccacgtctccccggggacagcccctctcactccccttgcagagagcctggggaggggctgagggaggatgggatggtccactaggaatgtttttaattccaaaggcagtgacatctgttcgtgggggccttaccaccaggctctgtttatccagccgggggagtcttgcaggtcgtctgaggagggctctggcaggtgtgggggatggaaggggtggggggagcaggtgtgggggatggaaggggtggggggagcaggtgtgggggatggaaggggtggggggagcaggtgggggtagaaagggtggggggagcaggtgtgggggatggaaggggtggggggagcaggtgtgggggatggaaggggtgggggaacaggtgtgggggatggaaggggtggggggagcaggtgtaggggatggaaggggtgggggagcaggtgtgggggatggaaggggtgggggagcaggtgtagggggtggaaggggtgggggggagcaggtttaggggatggaaggagtgagggaggaaggagagtggccccttcccaggtggttgggatagcctgagctgaacccagcagagatgaggaggggtccgtggtgggctgcagcgactagaattcagacttctgcttttgctggggacatctgtcttgcacagatcttcttccacccaagaccattgactccaggaagcaatgagtcgggcttgggggagagaaggcaagtctgcgctgtccccagaggaagcccccagtccatagggaggaagggaaagatgagcgtctcaggggaagactcccaactcggctacccatctgcgaaggcacttatgtcaccatggagaccagctggccatcgttcatccagtccgagcttgctttacctagacaagtattgagcctgtggtacctaagacagatgagtgccgggccttgggaacgggattcacacggcccccttctcccccacacccggcggcagggaggggcgtgcattctcgcagtctgcaccctgtggcctgggacccagcccgagggaaggggaccataggccagtgaggggccgattctgaagttaagtcacggcaccaggagcactgtggcgcaaacgtggagagcagttataatggcatcctaccagccagttacatgacagccattgcacgtttgctggagggaggtagagtaaagctgggacccagtgagggtggatggcctttccctacagccccgagggccccacgctgacccctctcctccaggaagccttccccagttgcctccagctggaaattgtatctctcgatgttcgtggcattttgtctgtcctgttctgaggccgtaatatgggattttgtgcgggttttgtccatctgggcgtggtgcctagtaggtgcacaagtgacccgtgccaaatgcacaaatgcttgtctgcctcctgttgatggacatctctgctttcttggctgcccctttgtcaagcactgacttttgattcgtctctgtgatgccttaacccccaccccagggtcgggcacgcagccaggccctcagtcactacctctagagtgacatgagtggggccaggtgcagtggttcatgcctgtaaacccagcactgtgggaggctgaggtcaggagtttgagaccagcctggccagcatggtgaaacctcgtctctgcgaaaaatacaaaaattagccgggcgtggtggtgggtgtgtgtagtcccatctactcaaggggctgaggcaggagagttgcttgagctggggaggcggaggctgcagtgagccaagattgcaccactgcactccagcctgggcaacagagcaagacactgcctcaaaaaaaaaaaaaaaaaaatgacatgagtgggaccaagcagtggggcctgaggagtgagcagagccttcctggaggagatggctttgtggctgtgtgaaggggctgtctgggtcctcctggagccctggaaggggcaggcgaaggaggggtggagaagggtgactgaggcctcagttaggggacacaggcatgttcctacctccgtccgtctctccacctccccctcaggcggtgctggtgaggctgttgtggctcagcccccacttagcagctcaggtttgaggaagttccgtgtgcaccgtccaggggtgcgtgtgacgtgtgagccaggaagaagtggagctggtctggccgcccctgcagggacagtgaagactgaggcccggttctagcccaggcaggacgccccaaggcccccctccaccagccaggtggaagatagtccagggccagatcctgccacactagggcatcacagtgagtgacaggggtgtgggctttggagttagccagacctccgtttgtgttccagcttgtcctggccttggacacgtagctcagcttgtcagagcccttcgtttcctcagaggtaaagcggggatgctggtactgacttcatacagttgggaggggtaagtgacttaatccatgatgcctggtccctgccagccttccacgaaggacagctctgactacggctgtctctgcagggaagccacctattcctcaaaaacaccaaggcctctgaggagaaatcccgacacctgcctggctggtgacgccggatgccgagggctcgtctctgggccccgacccacctgccttggggtcaaccaagaaatgtcctgacccagctctttttcctgaatccaaagcatcatccatgtttgagtaaggcacagtgcttgtgagcaccaagggctttggagggacctccccatcctcacttggcactgtgtaaccctggcaagaactggacctcctgaccccctgtcctcacctctctagaacagggcagtaacaccaacatgacaagaatgtgaggctcacatgcagtcgggcgtttgaaagacctggttcgcggttgccacggtgcaaatactggtttcctttctgtgccgtgctggggtctgcagaggtccgaggccccagacacccctgggttttgcatagttaaacatttgggattcagcctttctcttttctctgaataccgtactctaacttgcactgttaccttgagacgtaatttgtgtcctagtctctgcggttagaaagttcactaaataaattgaaggtcaagaacaagttcttctctctctcaaggcgcccagcacggacacgggtggttgcccgtggcgtcctctgcgcccagcacggacgcgggtggttgcccgtggcgtcctctgcgcccagcacggacgcgggtggttgcccgtggcgtcctctgcccctggcagcggaaaccttttttggtgaggtgcaaagggccatggttcaaagtgacccctcaagaggcatctctggctggacgtgtgacccgcgtcgtttcgggcttttgctcctgtccctgagcagatcagtgacccgattcccactgggattcccacactaggggtctcctttatccttacatttctcacctgaggaggcttctgagtgccggtccacaagggtctggccgggtcaccaagctggctctgaggaaggtgcctggggcagaagttgggggtggggaagtgcgaccccagggcagtcagagtcttttgcccggggaggagggcagctgtttgtggccaaaatgcagcccccgcctggcccccggcccctccgcttggcccctggagcagcccggtgggcaacacggggacccagcagggagggactggggtgtggggctggtgtaaactttattgcgagggagggcggcggggtcggggaggagcagcgcccttgccagggatgaaacccggggttggggcttggaggggcggccctgggcctgggaggcggcgctcagcctgggctgcagcctcgcggagggcggggaaggagggatgcggaggagggaggagggaggagggacgcggacggagggagggagggaggggagcgcggggagggagggagggagggaggcgagcgcggggaaagccggcgggactagggaactagcgggactggcagccgggactgagcgctccacaggcgccttctctccagcgccgcgtcccgtcccccccggcatgaccgacgtcctgccccagcccgactgcagcccgaaggcggggcgcgaacccctggcgctggaggagtcggggagcaagcgcccccccaacaccggcgcccggctctggggccgcgtgcgcaacaagctgctccgaaacaaggtgcccgcgggggctggaggttccggggggtgggggctcgggggcgctgcggggctcggggggctgcgggggctgcgggggctgatggggtcccgctcccgccccctccgtggagtcccgggacagagctggggtctgtgcgcgtccctctaagtggcttgaacttgatggcgaacgctggggccgcccccacccggaccctggcgctcgggcatctgcccctgcctcgggagaagggaggtttcttctcggcaggtggaccctgctttccactccgggagtgcaaacagcgcacggggagacgcctgcctctgggtctatgtcttgccgccctgttcagcctctacctgatccctgcatccagcgggccttgctggctgcccctttgctgaggggcgccgaccgcagcaccgtctgccgtgtgaggtttctctgtgcaggattgtggggaggggagatgctgccgggtctgggggctcgaggcttcccttcagggaccacccatctgactgtgggcccagtgcccgccgggcaccaggcgttccgtccatgtgccagggcagaccgccggtgcccctgcagccccagacctgagttgggattaaaatctgagatagaagccgactgtcctgcagctgggcaggctgcctcggggctggcttggggccctggcatcaggcacgtgaggaagagccagacccagcgcccagcgcacaggaagtgctcgataactctgcagatcaaatcaactgtccgagttagctgtctcagagtgccagtccggctggccagggctgggcccatccatcaagagagcaacaagggaggccttggccagtccgtggtggggatctgcagctcctcctgaggctcacaggacctctctgcaggctcttactgccagccggcattgaggctcctggcatcagccaggacgaagtgatcttgggctcactggcccctcgttttgtttcagctcctgccatggggcatacttgacctcccagaggtgacatcagccctggaaagtgctgggcagggcagcaacttgagctgtactgcactggcccctgtgtcaccttcagcctccctggggactgggctagcagagccctgctggccccagctgctgccagagcccctctgtgctgaggcagctgtctgtgcccggcagcgtggactcatcccctccccagcccctgctgaggccagcaggcaccagcccagagctcaccatccatccccaaacgtcagggttggcaagaaactgacctggcaggttccgggtccagcgccagccaaacagggcgcttccagtttacctgcccctttgaggaggtgcctggtgggcagggggcaacttttaaacctgaggtcccagactttcagttctttccctatgcatttgtggccggcagaactgagaagccccttcaagaattccttagctgggtttgcctctggcagtgcctggtggctccgtgtctgatggggatctctgggcaggggtggtggccaggcagacgccgggctattgagctgctgagcagttggcgtcagtgcagctcagggtggccccggccctgggctgctctgtgtgacgagcgattccatcccctaacgtgtgctgtgtgccacagtgtgtccgtgtcgtggacgcaggggtcagcgctgtggcggacggagggacgtctgccacagtgtgtccgtgtcgtggacgcaggggtcagcgctgtggtggacggagggacgtctgccacagtgtgtccgtgtcgtggacacgggtcagcgctgtggtggacggagggacgtctgccctgtgcttcccacctcactgtgcgcaggccagcgggtgagcagcagagtcaaagggccaggcctcttgctttctatcctcagccacattaacctggcattttcctgcaggagcttcacagttgggccgaggggctgggactaggcagtttcgtttcggtggggtaagggaagggtgcctggtactgcccagactggcaggagggattgcctcattaactcctcgttaactttgccctgagtgatgctgtgggtgcgagaaacaccggtggccctcctgcttccactgacctgaaggttcattaaaggctggaggcggggcgtgactcatccagggctgggattaaacaatctgttcagatggaaaggtctcatgatcagaactgagcctttaaatagtgcagggcctctggtttctgggggagaggaggcagggacactcacggaggatcctttgggtaccagcgggggtccctgtggttgggctgttcttgtcaccggaggagagttcaggggccaaagcctcattccagcccctgacttggcagtcagctttttgtgcgagtgtttagctgggagacacgtggcatctgggtttgtgggttcagccagggctctcggtattgaacttcgcgtttctacttttctttccttttccctgtttgtttttttttttttttgcctcaaatcacactcaagtagaccaggcccggtgccttcctctccctcccatccttccctcttctagattcttggttgagctttggatgggaaggggctgaattctagattctcgcttgagctttggaggggaaggggctgaaggaggaacccccccaccctgcccccgcagcatccccttgtgggagccgtgaggaggctaagagggcctgaagggaggccggtccagaagcatttgtctgtcggggaagttgaggcccttatagagcaaccaagtccaagacgctcctgacccagaccaggccagatgctggccggcggtggggactcaggctgagccggcagggtgtaaggagattgagtgcagcttcaggtgaccttgtctctgccctgaagcacagccatgtgggtctgagaatcccctacttccaaagagctcctcttaagctggacaccggcactgctgacccccacggtgagtcccgtgttctgtgatgggagctgctgcctttgcttcagagaggatcagaggtgttacctgaggaagggcggggtggagagcccctcttgggccattcggggaagcttcaggctcatgatggtcttagaagaaggtccctttcttggatcacctgatgtcaggagtccaagaccagcctggccaacatggagaagccccgtctcaactaacaatgcaaaaattagccaagtgtggtggctcacgcctgtcatcccagcactttgggaggcagaggcgggtggatcacctgaggtcaggcgttcgagaccagcctggccaacatggtgaaaccccgtgtctactaaaaatacaaaaaaaaaaaaaatagccgggcatggtggcgggcacctgtaatcccagctgctagggaggctgaggcaggagcatcgcttgaacctgggaggtggaggttgcagtgagccgagatcatgccactgcactccagcctgggcaacagagcgagactcggtcttggggtggggggaggaaagggtccctttctttgtcagcttgatcgccaccgcaggacaaccccacccctcacagagcctgtcgtttattccttcttgatggtaccaggtgtgcagaccacgtgcacaccccagaggttcactctaccactcacttggccatcgagggtacacaggtgctgggtacaagatacagatatgtcttgggctcgtctactttattttataatccagtctgggcgtcaggaaagatctcgcagccttctgcaatagaagtctggcctggcccggctgcccaccgcccttccttgtttcccggtgggaagaaagcttcatcgtgcgtcttctctgttcacacacacccccatagcgacccctcagccacagacaggggactacagtgctgcctcccccgagagctggaggcccctacaccagcccacctcttcctgggcctatgtgtgggtcctgactgcggccaggctggctgacaggttggcagtggggtcgggcgaccctccctcttttccacagcacttacccacctgccgagtgggcagacctcactgctggggcctcatgagtactctctgatctctctgccaggccagctcccaagaggcttgcttgagtccgcagagcgggaaccctggactctgagaatctgatgaaggttctggaggccactcagacacagagccaccccatgcacacactgtgtgcgacttcagagggggctgcagacatcaaggcgggaaccctgctctgagtgaacttggcaaggtgccgcttcttggtacctagggagggtagaagggcgctggtcctccccggcctccctgcaggccacagacggcttggccagccagcggtgctgggcgcggtgccccagcttttggatggctctggaccagggagaggagaacctgccaatcaagggggttcctcaaaggccaaagctgcctgagcccagtgttgctgtagtacccagaggcaatgaggccccagacattttggaaggagcccccaagcctgcaggtgtggctgggggagctgccccaggcattttggaaggagcccccaagcctgcaggtgtgagtctgggggagctgccccaggcattttggaaggagcccccaagcctgcaggtgtgagtctgggggagctgccccaggcattttggaagcgcccccaagcctgcaggtgtgagtctgggggagctgccaggtgttggccacagggcgctggtgctggagaggcctggccctctgctgagtggcctcgctcactgcccaggtggttgggaactggtcagcaggtgctgttctttgacctcgtttcccctgtgaactcatgctggggcaggaagatgtttgtgtcctgacggccccccagcaccttcgaggaacagacagtcccctgcgcctgtgacctgcctgccccaccctggggagaaacgcagcgtcagtcctgggtccagtgagccgtagacccttggccctccaggatgggccctggagaggcgggaggggcccgtggagctggtcctgggcttctgtagagaggccaggaggccccaggatccccacagagacttccccagtcccgcttcaagacagcggaaccagctcctgagccgaaatctggagggatctcctttctggaccgtgaccccagccggggctggtaccgatgaccggcacagccagagccgtgacatccacagcgcccttcccatccgatgcctggatgccgtggctgtgctcggggaggcctccggggtccccagcccctcaggctcatgtggcacaaggtgccagagaagacagggcgccaggccggtgggagtcaaggtttcccatttttctcgtctcagtctgctacttaactgctgtgtgcccgcgagtacatccctttgcctctctggttctctggtatcagctcaatgaaggagctgaacaggatgatctcctggaatccagttcatgtgatgatcttggccatgtctcaagattcctagtcctaaaccttaaaccctgagcaccctgggagagtctgtcacagggctgcacctgggccaatgccagccattcagtggacacgggagcagggggtttagtgggaacacagggcttcttgagccctgtcctgaagcagccccggcggggagccattgtcacctccttcccccatgccccagttggttcctctggcctgtgagtattgccggagcaccttccacgtgccaggcctgcaggaactagggacacagaggcgcccgagacagacgagaccctgtctgcaggaggagtccgtcaacaaatgagatccttgccggtcagatgagtgctgtgaaaaaaataaacacaactgggtaacgcagtagagagtgacggggggatgcctggcttgagaggatcacttttgaacgaagatttaaatgacaagaagaattcagccataaaaaacctgggggcagtgcattccaggccaaagaaccggcaaggtccacaccccgaggcaggtgtgctcagaggcagagggggacagtgtggggcgttacgtggggtcaggggacggcggccaggcgacgtggggccctgcggttcaggacagggcctttaatccgaatgcagtgggaagccgcggggtgttcaagcacagttctgtgacgatatgttttgaacacgtactgtacgaggcatcattcttagcctgtgacgcaactgaggtgacacttacaaggtgctgttattcacactgtttatttatttatttgtttgggttcttttgtttttgtttgctgttgttgttttgagacagagtcttgctgtgtcgcccaggctggagtgcaatggcgcgatctcggctcgctgcagcctccgcctcccgggttcaagcgattctcctgcctcagcctcctgagtagctgggattacaggtgcccgccaccacgcccggccaagttttgtatttttttttttttttttttgagacggagtctcgctgtcgcccaggctggagtgcagtggcgcaatcttggctcactgcaggctccgccccctggggttcacgccattctcctgcctcagcctcccgagtagctgggactacaggcgcccgccacctcgcccagctaattttttgtatttttagtagagacggggtttcaccgtgttagccaggctggtcttgaactcctgacctcaggtgatccacccgcctcagcttcccaaagtgctgagattacaggcgtgagtcactgcgccaggcctaaatgtgttttgaattttgttttacatttttaattttttttttttttttttttgtgggagtctcactctctcgcccaggctggagtgcagtggcaccatctcggctcactgcagcctccatctcccaggctcaagcaatcctcccacctcagcctcccaagtagctgggtctacaggcatgtaccaacatgcctggctaatttttgtattttttgtaaagacgaggtttcgttatgttgcgcaggctgatgttgaacttctggcttcagtggatccacctgcctccgcctcccacagtgctggattacaggcgggagcccccgtgcctggcccagactgtttttatatatgaggaatgaggctcagagagtgactcagatgaagtcacgtgagtggcttagccgaggggcgacgttcagaccccggccactcagcctcagcgcaggctctcacccgcggtgtcctgccttccgtggccggttggggttgggctgcgtgccccagatgggagcgtctggagacgccgggctcctgcccgtcaggcatcagtgtggtgcccgtcctggcacgctgtgcatagcaacaggcaagacggttcttctcgacgacgccactgaacgtgagactcggagcaaggcaaggcctgggaggggccgctcagagctgacctgggccctggaattgctggagcccctcacgtccccggcagcaagctccatgcccagaaagtgttctgggcccgggcagggagggtgaagctggtatcagagaaggctgttgatgctgctttttttttttttttttttttttttgagatggagtctcgctctgtcgcccaggctggagtacaatggcacaatctcggctcaccgcaacctccgcctcctgggttcaagcggttctcctgcctcagccccctgagtagctgggtttacaggcatgtgccaccacgccggggtaatttttgtatttttagtagagacagggtttctccatgttggccaggctggtctcgaactcctgacctcaggtgatcctcccacctaggcctcccacagtgctgggattacaggtgtgaaccaccgcgcccagccctgttaatgtttcttaaccactccaggtccagctcgaggcttcagagcccatggaggtctgacaggtccttggccttcccgtggcctccagcgtgaagcttcctggtcaggaccacagaaggcctctcatcttggactttgacctctgagggcgcccctttcctttcaggacagggcctccgtgttgctttggccctggcctgttccttttctcaagagggccccactgcccctgcccttgccactctggcatcctcgacctgccctgggctggggcagggccggcttcctggctggtatttgtagcccagttctgagctgaagctgaagcctccaggctgcctgcacagggaggcagtggtggggtgggctggccctgaggaagacggagccctaggccgctgggggagatgtgcctggctgtggggcctccaagagcagcccaggtttggattttgtctgcttctcctcaaggtcagccatgcccagcccgggggctaaaagcaaagtgggtgccagggcaggcagaggctctggagtggacgtggggccggcagaggcgctggagtggacgtggggccggcagaggcgctggagtggacgtggggccggcagaggcgctgtagtggacgtggggccggcagaggctctgcagtggacgtggggccggcagaggcgctggagcggacgtggggcaggcagaggctctgcagtggacgtggggccggcagaggctctggagcggacgtggggcaggcagaggtgctagaatggacgctggggaaggcaggttgctgcgggtgctaagaggctagcctgccttggacaaaagcgtcgttcagagctgctaatccccttcctcccatgaggcttggggaacttcgaagttctctggtgttggaggggaagccagccgaggccctgggacacggcatcagcccgagcctatctgtggctggcctgggtatggcaggtgggcacaccttggctgcaggacaccttggctacaagggagcctggctgaccctgcagggtgagggctggagaggcggagcctgcctggcctagcagtgtggatgccaagccatgggaagatgtgtggagagtttatggagcctggcccggtgtccccaacccagctgctgagctggaagccaggggtaggtcctggcagcccctccctctctgccctgcctctctcggagtcgctcggagcagtcacgttgacggaatcctccggcgcctcctcgagggaggagaggcagggtcttggcaactcccgtctcccccgttgccagcttgccagccccgccgtgcctctcacgcctgtggtctgccccaatgacaggccggcttcggtgtcccaaggggacccagccctgagcgtggggctgcccttgggggagggcaggggaaagccagcccgggctgccaccgtggccgctggcctgggagccccaggaaacgtgcccaccctcagacccgatgcctggctcagggcctgggctccgcggcccctccagggcaggcgtgaaatgtgcccacacagctccaccttccacgtggttccctgtccgggggccacttgcactgaggtccttctggagtcattttctgtttttttttttttttttttgagacagagtcttgctctgttgcccaggctggagtgcagtggtgctatcttggctcactgcaacccctgcctcccgggttcaagtgatttccggctaattttgtatttttagtagagatggggtttcgtcaggttggccaggctggtctcgaactcctgagctcgagtgatccgcccgcctctgcctcccagagtgctgggattacaggcatgagccaccgcgcccggctgggagtcattttctagcgttcctgtcccacctctcaggaacagatttaccacctttgttgtgaagaagcattttttttttttttctgccgccaggctggagtgcagtggcacaatctcaactccggctcactgcaacctccgcctcccgggttcaagcgattctcctgcctcagcctccccagtagctgggattacaggcacccgccaccacgcctggctaatttttgtatttttagtagagacggggtttcgccacgttggtcaggttggtctcgatctcctgaccttgtgatccgcccgcctcggcctcccaaagtgctgggatgacaggcgtgagccaccgcacctggctgaagaagcacttttttttatgaacctctgcaaccccctctgagggaaaccctcccgcattctgggatgccggggctcagagggtggagggtagaagagcgccagccgtgagaggcaggatggggcggcccccgagggcagggctgtgcctggaggcagggctcctcggggggtcagctcctgggcggtgggagtgaccgagtgggctcctgagggaagcggctttcaggaaggaggcggaggcctgggagctcttggggccctggcaaatgtggtcttcagattcccgtcgtccagtgagcccctggatcacgtcctgagtggcgtccactgaaggctgcttgggacctctgctcccccctccactgagacccccagtggccagttctaagtcccacctgccttgggcagggccaccacaggccccttactgtggattaaagggccctgggtgagggcttgtgggaggggaggtggtggaaaccatctccgaagaccttggggcgagctgcgtgctggagtggagagtgtggcccagcaggcaggagcactgggttggaatgggggctctgccacctccgagggagcaggagtggagaccggagggagcgtgcccctgaatccgagcacggggagctggccgggagcagccctccgggcagaggcaggagaaatggggtcacctgccccagggggtgagaggtgagccgagaggaagggctgagaccctcaggggcatccccaggatgttcctgaaactcagccctggaggacgctcaggtgtgcgtggagcaccctctgccctggagcctcaaatcctctccccgctgcggggccactttgctgattcctgccccaaacatgaggtcacttcggtccagaaaggcgaggcgacctccaccagccacctacgggattcttggcagagaatccacgctcaccttcgggtcttcactcctgctccctcggaggtgacggagccccatttcaacccggtgcccctgcctgctgggttttcgccgcaggggacctggtcgtctcctggacatgagcccccagcgccagcgtttctctttgggagaggcctgaatgcgcagtcatgatttgaccaggcgaagtgcccagacaaagagaaaacagtcggccggatgcaggggctcacgcctggaatcccagcactttgggaggccgaggcgggtggatcacctgaggtcaggagttggagaccagcctggccaacacggtgaaaccccgtctctactaaaaatacaaaaattagccgggcgtggtggctcgtgcctgtagccccagctactcgggaggctgaggcaggagaatcgctcgaacccgaaggtggaggttgcagtgagctgagatcgcgccactgcactccagcctgggcgacagagtgcgactccgtctcaaaaaaaaaaaagaaggaaatagttgagctgctctcagtgaccatgtacggcccagtcgtcgacccctggcccagtcgttcgtccgccttttggctccacgatgttttgcagcctgtttctgtctcctgcctgtggcccaccttggggaggccccagtgctcgtgtgcccctggtggtcttcccagcctgacccttcacgagctccctctgtctccctgcttcaggtgatcagacatcccccaagtacctgctcccctgggcccatggaaggcacctgtctgctgggaccagagggtgagcagtcaggtgtcccatccaccaacgtcccaggggccagcccctccaccccggtgctaatctcatcaggaaatagcacagtccacatttcccaggagttataaatagccagcgcagttgcgggcagcagcgtttctctggaaaatgtacgctgtgcctctccctccctcctctgtgtttaaatgatatcctgaaatagacttggtttctggaggctgatagcctcctgggaaacagagcgtcgttgtcagggcaccgtggggccaggcaggcctctctgagcggataccagggccacacctgcagcaggcaccagggccacacctgcagcagataccagggccacacctgcagcaggcaccaggaagatgtcagggcttgaggggcttacagcttaggaaagtgcccctggcccaggcctggcctcagaaggggctggagtgtgtgagacagcagcaagtgtcgcctgggaggctgcagagggtagatcttagtggagcaggaaggcagagaggacccaaagtttcccactgtgacctggggctctccgagaaggctctctggaggaggcggggcgagaactgggccttagcatcaggaggtgcagtcctgggtcagatgtgcccaggttgaacctggcagctggagcggaagtgatgggcacgaggcagcgggagggctgtactgggggtggcctcccagcaccaggtctgcccaccgggtcgggacacacaccaggaggcccgatgttgcctttctgaggaagcagcagttacagcagctgcgggtcatggacttcacacattctgcagtttcagcagagagggtgctgggggccttgattttgaaccccagctctgacttcctaggtgtgcactgggtaaattcctcactctcgttaagctgcagcatcctcatctgtgagatgggagcggctatgagagcttaaaccgcatatgtctgctatcatgatcatgaacgcagatgctgtgtgtagaggattcatcagtgtcagacttgcaggaagagctcgagataagtccgttgctctcactcttccataacagccctgtgagtcaggtgtggatgcctccatgaggaaattgaagttcacggaggtgaaaggccttgcccgagtgcgcacggttgaatgggagactcagatcagcctgcctccaaatcctgcacactccccccgaccaggttgtgtccaggtccccctgagacttgggaagggaccattggctcagcttcctgcagaagctgccaggaggcacccagtcgtgggaagctggggcggaggaggggctgtgggtgaatcggaccaggggccatggaattggcctgaggcttatgctgatgtgtggagagacctgcctcaagaaggggtggtctcaaaacatcgaactgcgccccataaatacatacaactgcaatgtgtcaattaaaaaataagggcccgggccaggcgtggtggctcacgcccgtaatcccagcactttgggaggccgaggtgggcgaatcacgaggtcaggagatcaagaccatcctggctaacacggtgaaaccccgtctctactaaaaatacaaaaaattagccgggggtggtggcgggcgcctgtagtcccagctactcaggaggctgaggcaggagaatggcgtgaacccgggaggcggagcttgcagtgagccaggatcgcgccacagcactccagcctgggcgacagagcaagactccgtctcaaaaataaataaataaataaaaaataagggcccacacagtggtacatgcctgtaatgccagctcttcaggaggctgaggcaggaggatcactgaagcccagggcaacatagcagcctggacggcacagtgagaccctgtctctagaaaaataaatacaggccgagtgcggtggctcacgcctgtcatcccagcactttgggaggccaaggtgggcggaccacctgaggtctggagttcaagaccagcctgggcaacatggtgaaaccccatctctactaaaaataaaaaaattggccaggcatggtggctcacacttgtaatcccagcactttgggaggccaaggtgggtgggtcatttgaggtcaggagttcgagaccagcctggccaacatggtgaaaccctgtctctactaaaaatacaaaaattagccgggtgtgatggtgcgcacctgtagtcccagctaattgggaggctgaggcagaagaatcggttgaacctgggagacgggttgcagtcagccgagatcacaccactgcactccagcctgggcaacaagagtgaaactctgtctcaaaaaaaaaaaaaaaaaaaaaagagggcatggccgctccagaatgtttcttccaagggtagcatctcagttgacaaagagcatttgattcctccaccctgtgtggctactgctgggggacagagctggggacagacccaggcccggctccgtgtccagacgagatgaaggaactacgagggacagcctgtgtgatccaggagggtttgcaaagaacagaagcagcttagaggggagagaggtttcgggaaagtaaggccagagctggggcttcctttgagaccctgtaggacccctgcctccagccgggctggtgatggcctcacgcttcccgtgtgtgaagaggtgcccggagcagtggttctccctgaggggcacttggttctctgcacacacccaacttctgtctcctgttctgggttccatcccttctctgggcagggcgaacccagtgcagacccagaccccgtcggaggcttgggtaccacctgcccccagccggtgtgtgggtgatagatgtgggaaggacctacatcgagctgcaggaagcccaaggctgacccagatccagtttcccttccgtgatgacagtggcctgttatagcaactgcgttcaaaccgtggcacgcacacctcagagtgcacagagacgttctgagggcgacgtgggcaggagagttttcaggaaatcagtttgcagattctcagctgccataggtgctattgccagaaagccatctgcctgagagccagcatctcgccatcctgtcctctgcagaggagaggcctgaggctggctgtcggggcttggcccggggtgcgcagacctcctgggtggggaacagaggggcttttagaaatgttggggtaggggccaggcatggtgggtcacacctgtaatcccagcactttgggaggccgaggcaggtggatcgcctgaggtcaggagctcgagaccagcctggccaacatggtgaaaccccatctccactacaaataaaaaattagctgggcgtggtggcaggcacctgtaatcccagctactcgggaggctgaggcaggagaatcacttgaacccgggaggtggagcttgcagtgagccgagactgcaccactgcactccagcctgggcgacagagcgagactccgtctcaaaaaaaaaaaaaaaaagaaacgttggggtcagtgttcagaaagtaaaagactctagtggccacttagaacctttcaaaagtcaggtggtatccagttctttgccttccacaaaactgatggaggactcaattttcaactgagagatcatttcaagtaattttcagtaataggtatatatgcgatttaaggcggatagcatggagagaggttaaagaatggtgtaacgcggctgtgataaaactcttttcgacctcatctacttctttatgtgaacaaaatgtttcattgttcacatatttcttgttcattttagagacatggtcctacattgcccaggctggtctcgaactcctgggctcaagtggtcctgtggctgggagccacagcacctgcacatctttacaacaaaaccagaaacatgaaccaaattgatgctgagcctcgtttcactctagcaaaaaataataccctatagatacgcgaactaaagcaaaaaatgttccgcccatctcattgagagagcattccaccaaaaagttactctgctacttaatatttattaaaatgtataatgaggccaggcgcggtggctcacgcctgtaatcccagcactttgggagaccgaggcgggtggatcacctgaggtcgggagttcgagatcagcctgaccaacatggagaaaccccatctctactaaaaatacaaaaaattagccgggtgtggttgtgtgtgtctgtaattccagctactcgggaggctgaggcaggagaatcgcttgaacccaggaggcggaggttgctgtgagccaagatcgcaccattgcactccggcctggacaataagagcgaaactctgtctcaaaaaaataaataaaatgtatataatgtgtcggcttactttttttttttttttcttgagacagggtctcactctgtcgccaggctggagtgcagtggtgtgatcttggctcaatgcaacctccacctcctgggttcaagcgattcttccatctcagcctcccaagtagtagcttggactacagtgcccgccaccacacccggctcacttttgtatttttagtagagacagggttttgtcatgttggccaggctggtctcgaattcctgacctcaggtgatccaccagcctcagcctcccaaagtgctgggattacaggcgtgagccaccgtgcctggctgtctttttaattatgtactgccaatcatggtactaactaatcctgaatatattttgaatatttggagccttgtggtctctggaaatttttgttttcaatgtatacagattttttttgtggaagcaaaatgtaatggtgaataaaggacttgaaaatataaaaatataaactaggacaacattctttaggagaaatggaatagaaacaaattcaaggagagaagatccaggagctctgtgagggaaagaagagcttgtttgtgtagttttttgttgttgttgttttttttgagacggagtctcactctgtcgcccaggctggagtgcagtggtgtgatctccgctcactgcaacctccacctactgggttcatgccattctcctgcctcagcctccccagcagctgggactacaggcgcccaccaccgcgcccggctaattttttgtatttttttttttttagtagagacggggtttcaccgtgttagccaggatggtctcgatctcctgacctcgtgatccgcctccctcggcctcccaaagtgctgggattacaggcatgagccaccgtgcctggcctgttttcttaatattgaattttgagagttttatataataagccctgaaattgggtaatattagccctatagctgtgttctttttcaacattgtttagatgttttttctttttttttgagacggagtctcgctctgtcgcccaggctggagtgcagtggcgcgatctcggctcactgcaagctctgcctcccgggttcacgctattctcctgcctcagcctcccaagtagctgggactacaggcgcccgccaccacgcccggctaattttttgtatttttagtagagacggggtttcaccgtgttagccaggatggtctcgatctcctgagctcgtgatctgcctgccttggcctctcaaagtgctgggattacaggcgtgagccgccacgcctggcctcgtgtagtttttaaatggatgagtgtgggtatcacgtcgctggggtatttagatcccactgaatccatgagaaggaatgatgtcacacttttattttaggatggcaatattgacatgattttggaaatcatactctttgcaactatttaaacttggaaatgttcagattttgacttcagaaagtgccagggagcgcacagttgctcagaattagttcgcaggtgcacaggcagacgggcgcgaaggcccccgagttacagaaacagaacgtggaacagtcctgtgtgagggttgcctctgacctcccctggggtccgcacctccctgggctccagcccgagcctggggacttcccctgtggaggatttgcttatttgggagccaatggcttgacccaagttttctccctgaatcttcccagcaatcccagggaggcaggttctgttgcagatggaataactgaggcttagtgagtttaaaacttgccaggattcaaacccaggcagcctcctgtgcgcgggctcctgactcttcaacacctccacgtggatgggctggttccctcctgatggacttgagcgcctcctaatcaggtgcttaccttttgtgagcctcagtttctgcatctgtgaaatggggtaataatacccatgtcccgggctggcagccaggagtgcctaacagggtgtgccctgcctcccccacggtgggtaacagagtgtgccctgcctcccccacggcgggtaacagggtgtgccctgcctcccccacggcgggtaacagggtgtgccctgcctcccccacggcggccacaggggcctgggggctagggtccccccaaagggttgatttccaggtaaacatcagcttatcccagctgctcacttccgccttcctgactgtgtagctggctctgagcagtgctgacccacggggagatctctggcttggcctccgagctggcacctctctcacccacattctctctctgcagctggacccacaaaccgtggagaccaagaactggcacacggacgtgattgagatgaacggggtgagccggggatgggaatgatcagtggcgtgagccgggaggtggaacgtctgtgcagcaggtgggcagcccggccctgtggctgctcctggggccgctgtgccgcctcgacctccccgcagcccagccccctctcccctcctgcccacaccctgcccgctgctgtcctgcaggtgttgtgttgagggagacctgggtgtgagctagccctcatttgcagtcttggggaggggacccctgtgttttgggggcattcctcgggcactcacaccctggggaatctttacctgcctcaccccccaaccagatcaaagtggaattttccatgaaattcaccagccgagatatgagcctgaagaggaccccgtccaaaaagcagaccggcgtcttcggtgtgaagatcagcgtggtgacgaagtaggtgctgcctcgggtctcccagtcctggcgtcggtgccccgggtcccccccagcccgggccccccagccctccccgccggtgcccatcctggcacctaatcagttaccccccgctcggcggtggcagatggccggtgtggatctagagtggccgcagaggcgctcacaggacacttcagaagcacgcgagccagcacctaaacgctggaaggtctcttgtgagatcccagatcgtctgctcctcgtaacaagcgggaagctctgtcagccgggggcctacgtttgggctcggcaccaacggggactggcggcccctcgggaaagggcacgtgtcccccggttcaccaccaccctggccccttgtctcaggcctgacccacctcctcatgtgggctgcctgctgggcctcctacaagcatctgaatctgggggacgttctttccctagagtctcggccttaccttcccaagttcccaaggcttctcctgcccacgtccgtcgatgccccttcggcaggcctcgggtgggctggctggggtggggtgcggtggcctctttctctgccctgcccctgcccccgccccagctctccatcccaaatgctagaagctctccagggtgtgtgtgtgctgggtgggggttgctacgggagagctgtcgtgggggctgccctccacccatcctcacgctccaccccaggcgggagcgctccaaggtgccctacatcgtccggcagtgtgtggaggaggtggagaagaggggtatcgaggaggttggcatctacaggatatcgggcgtggccacggacatccaggcgctcaaggccgtcttcgatgccagtgagtctgggaggcccagccggggcaggtgtggctgtgtctgagcaggctggtgggatggacaggagagctcgggggaaccaggagcctccctggagaggaggcttgctctgcttcagagtccccgtggcaagtgctttctcttgtaatcccctcccctccaatctcttgtcccttgctgcaggtaagcaactgcagaaactcacaagggccgactcacttgcccaggatgacccaacttgtaggttttggttctggacttaaaactcagatctgactccagtgtctttcttgctagttcctgggtgcctggtgagccgcagggaaagagctttgagcctgcacctgctgtctccagggccccaggtcccctctggggcagtgctgcctctgcgtgaagcccaccatggtgaggcctgacctttctggtttctcctccctgctcctgctggttcaggtgcagcagccacataccccactgtcaagaaacctgcactggccaggcagggatgaatccgtggggagcctggagtggaggacggggtggggcctgggaactggccggcgttggtgcctctgtgcagcctagaagctgaggctttgtcggaacatgcttttacgtgtgaaaagtgtgcaatgccttccagagaggggcttagcgatggagaggttccagtcggaaggaagctgcaggccacatggtatgaatgtggctctgaactctgggtgatggatttcactccccaaacaccctttcccaagcagccacagcagatggcccccaggctatctctccctgttcccccaaccccgacccacagagccgagtcacagacacctgtgggccctctctacatcctgctcttccaggggagaccagaaccagagctggagtgggtgggggctgtgtcaggatgggtcgggggtggaacggggctgctggcccagctaaggctgcctgacctcggccccacccctgcagataacaaggacatcctgctgatgctgagtgacatggacatcaacgccatcgccgggacgctcaagctgtacttccgggaactgcccgagccgctcctcacggaccgactctacccagccttcatggagggcatcggtgaggccctgagggctcctaggactgggctgggccagactgagccaggactccctgcccggagaagtaaccagcaggagaaatatctgtggcttcctttgctggctgaccttcccagtgcactggggcctgtggctgaggggtccgagggtgaggtgtggcctgctgggacctggtgcagacactgggccctttctcgcctgcctcttgcccctgatgtccccatgggcagccccttctgcttcctatttggacgttggcctcttgcttggaagctcgagcatccagggaagactgccctgaggtgagtggccagaagccagcatcccagaaccaaggaggaggctggcttaagccatagggcactcgagatgggttgtgctgagccttccagcgggaccacacaccgtcccgtcacctctgcggagggccccggccagcaggccttccgcctccacccacctgggccaaacccagccccaaggaatcccttcagccttctctgctcctggggcagactggagcttcagcccccacggaaggctgcttgcacccacgctccagcagcagaaggggtggagaaagagaatccaccgctggcaggatatgtccctactggcttaaccttagccacacagaccagggggtgtcctgttacgagacaggggatgccccagcacccaaggcctatgcagtcagctgcaggaagggggtctgctcccaccagccggcctcctggctgagttaccagtcgtggtggggcctcctggaggaagcagctgctgacagcccacccagacaccaggccctcccctgtggggtctgctccccaaaggcctggaagcctgggctctctcccgcaggggcccacagcctcacgaccacaggggccctggcggggagccccaggagccaaacgccacactggcccttctctcccacagccctgtcagaccctgctgccaaggaaaactgcatgatgcacctgctccgctccctgcccgaccccaacctcatcaccttcctcttcctgctggaacacttgaaaaggtaacggggagcggccccaaccccacctcctcagtccctcctcatgaaaaggtaacggggaggggccccaaccccacctcctcagtccctcctcgtgaaaaggtaacggggagtggccccaaccccacctcctcagtccctcctcgtgggcgctggcctccatcgggctgtctgtggggagtgagagtttgctttccaagttcttgcactcatgtttttctgttttgagaaatatttgggtcccgtaaccagtagtaacctcaaatattgaccatagaatgctcagaatggcagggtgagagcccaggactacaggcaggttttataatcagtgggtcccaacctactggtggttcattcaacgaatgtagccatttctagatgcagtggggggtggacagcagtggggggtggacagcagtggggggtggacagcagtggggaatggacagtagtggggatggacagcagtgggggaatggacagcagtggggatggacagcagtgggggacagacagcaggaggatacattgtaagccttgatgcaggtgctgcttttcagttacatagagacgtgtggactgtgttacagcatgggttgtattgtgggccacagtcaaaaaaggtgaaacccactggtcttggcccacacctcactagacatagggaaactgagtccccacaccaggcggagacttgcttgggttagtagcagacctgtccttagagccctcaacttccagatcctaaattcagacccttcttgccttcccaccaccctttctagtcaggtccaaccaagagtggctaaagttggttgtacttgtagcaaagttcagaggtcctcaggcttgcgtggggaggtggtccctgggcgtcccttaaacccacctgcacgccaggaccggggagccccctcagactgctctgcggaacaattcttccctgagctcagccccagctcagggccaggccccccgctgcagctcagccacgccaggctcgggagagccagtggagacctggacgcgcccggggctggtgtcttgtttttcccatcatgaaacatttttcctctggtttggccaggactagagccccaaccaattccgaaagcatttggcaagccttgtggggaggagtgggaagggaaaattcattcggcttccaccctgggaactgggcacagtctgttcccacatctgggcccctggctggaccgtgtgcgcgcgtgtggtgaggggctggccccgctgcacagctgcctgttggcatcacagtgtttgtttgcctgtttccaaagcaggcgcagccacagctcctgcctggagggtgggaatgatggtattgagggtgagaggcgctgcttagggtgggtgggtctcagcccagaaacattttttgagactgaaggagaaccagaggccctctgatatgtttgctgaccctgggcctgcctggacaccagccctgatggcagctcctgctgttaccccagggaagcatcgcagagcatctggcctgttgagtaagagaagcaggagaggatccagagggaggacaatcctgggtcccacgaggcagacggagaggcataggaggcagccctgggtcccatgaggcagacccttccggagaggcacaagaggaagccctgggtcccacgaggccgacctttccggacaggcacggggggacagtccccgggctcatctggaagtagggctgctcctgccccagcacagctggcagagccccgggtctagctagtgactcctgctgggctccaggccctgcctgcctttctcccctgccccacccaccttaactcttcttttgggccacttagcacatgagaaagcaacagagcggtaggtcctggaggcagctaccggggttcaaatcccagctctaccagttgctggctgtgtgaccttgggcaagtcacttaacccctctgtacttcggtttcttcatctacacgatgggggtgacgataatcatatttacctcaaaggactgcggcgagtgtgagttgttccagggagttttcagaacagtatctgctctcaggcaagggagctggagttggcatctgtgggctccctggctctggcagttcaccatcagttcagggggacccagcagctggagatgttagcacagaacactggcacatggctggggccctgctctcctggatgagtccccttcccccgggggaggtccccactcctaggagacagagacgaggtgaccccttccaggagtccttcaggagttcccacagcgaaggccaagggtcctggagctccgagtggctgctgaggaagggcttctttcctccccatcttctccttcttagggttgccgagaaggagcccatcaacaaaatgtcacttcacaacctggctaccgtgtttggacccacgttactgagaccctcagaagtggagagcaaagcacacctcacctcggctgcggacatctggtcccatgacgtcatggcgcaggtaccctggcaccgcccgggcccgtggctggcggagggtgacggtcccatgacgtcatggcgcaggtaccctggcaccgcccgggcccgtggctggcggagggtgacggtcccatgacgtcatggcgcaggtaccctggcaccgcccgggcccgtggctggcggagggtgacggtcccatgacgtcatggcgtaggtaccctggcaccgcccgggcccgtggctggcggagggtgacggtcccatgacgtcatggcgcaggtaccctggcaccgcccgggcccgtggctggcggagggtgacggtcccatgacgtcatggcgcaggtaccctggcaccgcccgggcccgtggctggcggagggtgacggtcccatgacgtcatggcgcaggtaccctggcaccgcccgggcccgtggctggcggagggtgagaccagccccttaggaggagagagaacagctcagagtccccacacctcttccctcgtgggaagctgggttgatgggctatggggtgtcaccagggaggcaggactgtagacacttctgcccctcccaggccaaaacaaacatgtgagcctagaccagggcccagagatgctggctgcattctcaggagggcctcagtctcagaaagcaagcccaggggtggggagatgctgggcccttgtcctcatgggtggaagctctgaggttgcttccaagggcgggaggcttccctgggattcctgcaagacccagagcaggggccggactgtggccgcctcaggacagagcagaagcttatggccaggttggggaagtggccctaggcccccgaccctctgccccgtagcaccttccacggctgcagaaaggcaaacacacctgggctccccaggaaggggcggtggccggagccagtctagggagtgggaggggcaacacaggctggagtcagcaaggacgaggcctaggacagggagcccagcctccgccttcctgtctccccacaggtccaggtcctcctctactacctgcagcacccccccatttccttcgcagaactcaagcggaacacactgtacttctccaccgacgtgtagcccgaggcagggtggctgcgggcgggtggtggaaccagcccctccagcctggggtccaactcagacttgaaagactgcaatagaaaactcccaaacccagcactccagactcgagggaagccagcttccaagaactggaatgcgtacgtcttttgtgccaccttgtacaaagccggctgcccagccccagcctcaccaccgcatcccacctcctgccctccatacctctagttgtgtctgatgctccgtgctgttcgggaattgttttatgtacacttgtcaggcagaaaaggtagtgaccggcccggcgtgggcacacagacagcccgctttgttctttcatttcctccagcactttctttccgcctgagtccagcccaaggccttttattttgcgctgtgtaactgctgccagcttctctcttggccctgctcccagatggcggtctcctggcagcctcccctcagtcttcctccacccgctcttccttcccagcctgcctgcatgcatgtgcacccttggtcttcgctccatcgccttgaaagctctgaagaggccctgggttgccgcggcagcagtggtctgtttgatgctgccgtttgccgctgccggcccctcctcagactccgcctttgggagcacacctgctttgccttgctgcctgtgcaaatgttggacaagcagacacactcacactcgtccccagcttagcacagagctggagcgcccatttctggaattttccgtttgggaatctccacttctggggtttacctgttcggcctcctgtctatcagtgaggcatctctgactgtttcttctactgcttttcagttcccttccctgctgttctatttcctttgagtgtaaagactcacaggtgacctgctatcgagatagccagagggtcaggagagaatgggggaggaggcggtcaggctgctgaggaaacaccacaggctgaacgggggaggaatgcacatgccacgctgggtgtcccgggtcgcggggaggcagctcagctcttaggagcaagttgtgggggcttttcaagaggggccaggcttcctggagggtgactgatgtggccgaagcaggtgtccaggcaggtaggctgcagccaggagctccctggcaccgcaggacctcgtggtactcttgccttagattttacacacactccacagccaagcactgccacggtcctccaggacctgggaagcaaaggcacaggcccacggtggccagccattgtggtgccgccccagcttctggatacagccttttgggtaaacactgggaactccagaagttgtggggagagtggggaatcagacagccgcctctaggggctgggttctgctggggcctccttgttggtgctgtaggcacccgccagggagcagggacccgacttgcagacgcattgcccggtactaggaaggagtgaggtgtgttcccaccgtacacttcccacacgagctgcggctgccagcctcgggccatcagcctaggagagcagatgcagctccaggggctcgacttatagccagttacagctccccggctcttctgtgtggcagagcgtcgtttccgggccctcagggctggggagctcagttcccattgcttgtgctcagggctgagtcttaaagaagggtttgccggccctaacgctgcagcgcgtgcgcggtgagaggccctttttgagcctgtttactcctgtggccttgggcagaacagtaaatactctgtgcacggaggaaagacatgcccaagaggaaggaagtactgaccatcggctgcctgtgagcagcttagcaaggagcccttgctccctgggaaaggcggtgaacttgagtctaaagatgcagtgcctggcccttcctaaggtccctgcctggcatccgagtgtcggtgtgtggcacagaaggctcctgcttgcttccaaagtgatggacaggaaggggcagagtgagtcacggcccagactgggcaccttcgcgtctcagcctcagggagccccacagccccaagctcgctgaggcaacgtgagaacaggctatgggaaggctgcaaaggctgagaaatgcaaaggctcatatttataaatcccacccccagagtggggagggtcaggtgccagacctggactaaactgcaccaaggaaacacccagcagggtctcctgtgagccggggaccatgcagcccgaaacctccagtcactgcgcccggcaggagtcaggagccagggactgtgcagcctggaacctccagtcactgtgcccagcagggtgggctgtgcccagcaggagtcaggctaagaaacgccaggtctgcctgttcttgctgggcaatggctgatggctgccagtttctgctgatacacaggtaggatgggacccttcatgaatatctgactttaataagttggtaaggatatatttttttgtctatgttctgtttcaacttatgtagattattataaattgatgtaaaccacgtgagaggaaaatgttaataaaaaatgcaaagccccatcatttgcacaaaactcag

SEQ ID NO: 15341 - DNA, 73067 bp, Homo sapiens
agcctcgtgcccaggcagccagccagctacaaacgtgctcctctttaggatgccagcaggctgctggctccctccctccctacccctcctccccttccccttccctcctctcctcgccacgcgcctccctcccctcccccttgctggaagagcactccggagcggctgcccgatgctggagtccgtgcggcagcatcagcaaggtggctgagtggccgggctgctggtgggcgccggggagcctggagcgatggctgcacgctcccgccgcggggacagaggctgccatggagattctcctcattattcgcttctgctgtaactgcacctatggtaacccaggtgctcgctgtgggaggtggcggaccctcccacctctgggggccggctggagtgggcttagatgtggccggggaggttagagggccgcagggaaggagggtgggcgagcggctggacctgaattcccccttcgttttggcggcatccagcctagagttgaaacctgggggctgctcagagcagggccgcttgcaaatggaaggaccaggctggaggggtccaggtggccccgaggatcggtggggaattggtgggctagtgtgagagaacttcctggaggggctgttagggagagacggcgacgagctgtgcccgcagacgtagtagccctgaggccagggagagggtctgcgggggccaggcacagcgtggcgatgggtggcgatggtccggacggcggcgttgccagccgagagggtgccagcgcgagccagagggagaagttgggagtttctttgtttctggagagaggcgcggaggctgggcggcacggtattgtgtgctccgcgcacatgcagcagtaggcggaggacacggaggggctgtgggagcaggaaggagaggtttgtttccagccgtgagagacccccagccgaggtctgggccctcaactgtggaaggcaggtcggcagggccagcgggagaggggtgtggcaagctactctgtgaaggtcacacacacacacacacacacacacaccacctttcggtggaagggacccggaccatcctccttgcagctcccgcagctggctgggggctggggggaagtcccgggacaggtgcatgtcatcaacacgactgtcggtcgtaggaggatgaagccggcccaggtagggaggtgtccagaagcccgtggaccctgcctcaagaggcaagacgtgccaaggggtgccctgcctgcctgtggcagggagtggggtgggcacgtgtggctcccaggccggctgctctgggcctgagtctgtgggagcagcaggcggctggttttaggaccttcctcttccttcccaccaggtgtttcggctctgcacccttctcagtcactttgctttcctatctccctggtaacctggagctccttggagctccttgtcgaaggctgacttgagggggatggtggcttgccggaagagagatggcaggtttcctgggctccttcccaggggcggctgtgctggaggggctgtgtggggccagtgccccctgaccttctcaggaccctcttgatggaagcaagctctgaggcagcctctctcctgcggcccagcagggcggctgcaggaaccctgttctcacttgaaattggcctggtcagcgatcagaggagaaatggtctttttggtctggcctaggagttggtcaggtcttgactctgcctccctgaaaaggaaacgtacccttggcttcctctcccttccccaaaaggaagcttcgactcagtgaaacggacctgggacctggagttcacgttgcttcggtctccgtgatactgttgttgaagtcggcttcaaagtggggaatgaggagtgaaagggccagctcgtgaggagggggctcaccccatcctggtcactctttccaagaacgctcctgtggttcattgaggttttacaggtgctgcctttccctgaagaaggtgcagctcaaagcaaggagtgcgggtggatctacccagctcccaccacttgtagccacaagtctctggcctcagttgccttgtctgtaaaatggggctagtgagaattgcttcccgttttaatcacaggaaataatgagagcaaagcagttaactcagtacccttgggcacagagcgagtacccagcaaactagagagagaccagcttgctgcccaagtcagtgtcagtggagagggagagtgggtgaggccgggcaggaagcaggccagcctgcaggagcccagggacaggggaagggccagagcgagtgcctcaccctgagttctcaggggaccccagcgtgcaggggccgtggggagcacaaacttcagggccgctcttattcccccggttccctccgtatctgatgtggtcccagtgccgccaccccccccacccccaccccccccgtgcacctgccctcctggccgcccttccagggctcattccacagccttactcaggtggactctggaggtgaccacagacatgttaataacccctctgaaacccaacctgccatgtgttcagacctctgagcttagtcagaaacctcttcctcttgggacccaagagagggctgcggggagccgataatgcagtgtcagctttctgtggagccgccactccggagcccaccctggcaggtgtctgctgagcttgtgctttcttttgggtctctggggttctccagtgtgattttttccccctgaagatgggctgagccacaggtgggtgccttaaacagcctcagaaatggatcccacctgagctaggacctgggctgcaccctcagtgccgaggataccccaagactggcctcattccttcaagcttccatggcccatggggagggtctctggaaactgctagataagaaagggctacagatatgtcatatgaagtgtatttacgtaaaccagtggttggccgggtactcatgcctgtaatcccaacttttggcagactgaggcaggaggattgcttgaggccaggagttcgagaccagcttgtatttggcttgaggccaggagttcgagaccagcaacatagtgagaccttgtctctatatttatttttatttaaacgaagactcactgtgtcgcccaggctggagtgcaatggcgcaatctcagctcactgcaacctctgcctcctggattcaagagattcccctgcctcagcctcccaagtagttgggattataggcgcctgccaccacacctggctaatttttgtatttttagtagagatggggtttcaccatgttggccaggctgttcttgaactcctgacctcaaatgatccacccgcttcggcctcccaaagtgctgggattacaggcgtgagccaccctgcccggcccctcgtctctatatttttaaaaaaattaaaataaatacataaataaaacataaagcagtggttttcaaccattattatacattcaaatcagtaaagaagctttatagaaatgctgatggcccttgtggtcttgcagagatttgggttgagttgacggggctggggagcagcatctgtatcttttaaccgctcccccagtgattccgacaggcagccaagctcggactgcgggtaaggctggtggccctgctgaggctgcattttcttcacagccagcagattgctccctgaagtgtctgcttagccgcgcacggggtatttatatctcaggctttggagaactatcaggtttggggcccggctagggcgtgcgtgttcacgctgggacctgtcacaacctggtcttatgggacacccagtctgggatccttcttcccagatgaccaacctgcctctgtcactgcccctgcggcaggaggcccaaggtcatgaccccagggacagagcatccaggtgcaggactgaagctgagcctcctgttgggagggtgggcgcagccgcgtacaggaagggtgttgggaagtgttgatccaccagctgccacctccacctgtccctgctgaatcccagccatcctcacttggtgtccgggttgtggagggtgtggctcttgggggcctgggctggccttgcctgcgtcctcccagcctctttggggctctcatatgtgaggcctaacctgagttgcttcaggaaacctttgcccctcaggctgccacgtgtttgagagcacagccttttttctttttttttgagatggagttttgctcttgttacccaggctggagtgcagtggcatgatcttggctcgctacaacttccgcctcccgggttcaagtgatttccctgcctcagcctcccaaatagctgggattacaggcatgtgccaccacgcctggctaatttttgtatttttaatagagatggggtttcactggttggccaggctggcctcggggagcagagcctttctgtggagatcaggccagcctcctggcctccagcctccctgcctccagccttcctgtgctttgctatctggggtttgaggatgtggggaggggtctttcctctgagagatgaggccagtcctgtggatcacagtgaggcatgccaatcccagctggctgtgcctggccttcagctccaggagcctgagaatgataaggtctggagagctgcccttcctggaaacacagcatgtctccttcccccattctggggtcctgcatgtggcaggtgtgctagactctgcagggcatggctgggtggagctgtgtgattctggggttctgcgtgtggcaggtatgctggactctgcggggcgtggctgggtggagctgtgtgattctggggtcctgcatgtggcaggtgtgctagactctgcagggcatggctgggtggagctgtgtgattctggggttctgcgtgtggcaggtgtgctggactctacggggcgtggctgggtggagctgtgtgattctggggtcctgcgtgtggcaggtgtgctagactctgcggggcgtggctgggtggagctgtgtgattctggggtcctgcgtgtggcaggtgtgctggactcttcggggcgtggctgggtggagctgtgtgattctggggtcctgcgtgtggcaggtgtgctggactcttcggggcgtggctgggtggagctgtgtgattcagggctgggggtccaggagagcatctgccttgagccaggtgaggccaggacaggcctggggaggggggcggggcggctctcgatgaagccatgtctgatgggagaggaggcagggctgcggagggagcaggggctgccagggctgtgtgtcacctgtgtctgctgtttggtcggcccggggagtgagaacagaggtgggggctgccgtgggctcactctggtgtccctcgaggggtgttcacgtgggaagcatgcgggtggggggacgaagctggtctctggggtgttgggttgccctcgtccatcatcctcttcctccttctccctgtctcccccgacagctctgctctacaagcccattgaccgggtcactcggagcaccctagtcctacacgtgagtgtcaagcctccgaatggccagagagggcttaggagttcagtggaagactgagcctgggtgagagggtgctggagtcaccgagaacagtccacctggggaatcaggggttcctaggctccaaggatgcctgtctggcccgcggtatccatgccgccaggctagggcctgaatacagcttggctactaagcttgacgtggccaggtgctcccggggaggcaggcattcctgcttccccacccgctgcctcctggtctccagtgtccttggagcagctgcagggcagacacagggtttctctcccagctgctcggggggatgagcctccacctggtctccacactggggagagagtatgactgtggccaggagaagagggggcagccagggccctctcccctgctgtgctggctctgattttttttttttttttttttttttgaggcggagtctcactctgtcacccaggctggagtgcagtggtgcgatctcggctcactgcaacctctgcctcctgggttcaagcaattctcctgcctcagcctcccgagtagctgggactacaggcgcccgccaccacgcccagctaatttttatatttttactagagatggggtttcaccacgttgcccaggctggtctcgaacttctgacctcaagagatcccccgcctcggcctcccaaagtgctgggatttcaggcatgagccgccgtgcccggcctgactctgatttgtagttcagattttgcgggaattaggcaggtccctgagtgcccaccctttggatggggactgagcactccccggtggccacacatcaggccccagagccgctcccctcaactcaccgcctcacccttcccaggacctgctgaagcacacacctgtggaccaccccgactacccgctgctgcaggatgccctccgcatctcccagaacttcctgtccagcatcaacgaggacatcgacccccgccggactgcagtgacaacgcccaagggggaggtgagctcagagcccggcacggcccctcacccaggctgagaagtatcaggtccctcgtccccttctctcacacacgggcggcaggtccctcgtccccttctctcacacacgggcggcaggtccctcgtccccttctctcacacacgggcggcaggtccctcgtccccttctctcacacacgggcggcaggtccctcgtccccttctctcacacacgggcggcaggtccctcgtccccttctctcacacacgggcggcaccgggtgcctcctgcctctccaatcctgatcccccattcccagccaaggagaggttttcagcccttggtcaccctgatgacctgcagctttccaggccctaggctgagaagtttaagtccagtgtctcattaatcctcataataatctagggaggccgggcacggtggctcacacctgtaatcccagcactttgggaggctgaggcaggtggatcacttgagttagaagtttgagaccagcctggccaacatggtgaagccccgtctttactaaaaatacaaaaattagctgggcgtggtggcggatgcctgtagtgccagctactcaggaggctgaggcaggagaattgcttgaacccaggaggcggaggttacagtgagccgagatcgcaccactgcactccagcctgggtgacagagtgagactccatctcagaaataataataacaatccagtgagccagaagaacctgaggctggggagtctctccaggtccaccacgcagtctttcagccactggtgtcagagctggattcctcacctgggactgtctggaggcccacgccggggaagtggcctccgggtgcctcattcttgaatgcagacacctgcctctggccagtgtgatgccgtcagggtctcctaggaagcgaagggagcaggagcttggagctgcttcagctcggcctgcacacgcagtggcttgcggggagcccacagcaggaaaggctggcgttggaggtggtggaggccgtccaggttgccggaatgtccagtgggcacctgcatgtgggacagccgttccctgggggcccttcttgatgcaagggtggggacagcccagcaaggggagtaccaggaagcatgagagggacagttgccttcgtggattggcagccgggcccgggtgaaaggcttcctgtccaggggaggccattaggcggccgttacgagtgaggctgacagggtgtctgctcctgtggtctgtttacgagcccccagggtctcctggggagaaagtggtgagggacaggcctggacagtgtccactgggcagagagagccgattccgtgcggctcctggtgctgatgtgcagcgtctggggatcccgtcgtctgttttactctggggatatctgaaaaatctccagagggcttagcgtaccctccgttttcagtcatcctttttttgagactgaatctcattccatcgtccaggctggagtgcaatggcgtgacctcagctccactgcagcctccaccctctgggttcaagcaattctcctgcctcatcctcccaagtagctgagattacaggcaggcgtcaccatgtctggctagtttttgtatttttagtagagacggggtttcgccacgttggccaggctggtctcaaactcctgacctcaggtgatccacccgcctcagcctcccaaattgctgggatgacaggtgtgaaccactgcgcccggcctcggtcatcttaattgtatactttgaatacgctcacctacgtattacagcagatgtaggtcacaccgtgtatcatacaggaaaggctggcacagatggggacgaccccccggctctgagcgggggttggaaactctggaactcccacgtggagcagaaaccacccagagcccaggttagagttggctgcaggtcccctctgggcactgctgcagtcccaggctggagggcccaggtctcatccccagggggctggagaagccagggaggagtagcacagacaggcctgagtgggtctcgggtctcgggtctcggttgagccggggctagatgaagttcgccgccgcggtcgggagggattgcaaacggggatgttcgtgccccagggtggagaaaccaggtcgtcccgggcagggggctccagggttagccgcggagagccccgtgcgttgcacacacttaatgtgccaggcactgtgctgtttcacatgcaccatctcgatgagtcaccttatgaggcagacctcactgtccgcacttaacagaaggtgaatctgggattcagagaggtcagggagcctgtctgagatcacagctgagaagcctgttggcattcaaacccatgcccatgtgactccaaaggcagtgcttgaaccacctttggttaagggatgacaggctatgccgcctctcggtccagtcctccctggctggccgtgcccccgtgtgcaggctctgccctcggccgcattcccctctgagcaggctggggggtctgccatctccctcagacgcgacagctggtgaaggacggcttcctggtggaagtgtcagagagctcccggaagctgcggcacgtcttcctctttacagatgtcctactgtgtgccaagctgaagaagacctctgcagggtgagtgtgtgagtccaggggcacggggcgggggagggggtccggacctctgcggggtgagtgtgcgagtccggggcgggggagggggtcctgacctctgcggggtgagtgtgcgagtccaggggcgggggagggggtccggacctctgcgaggtgagtgtgtgagtccaggggcgggggagggggtcctgacctctgcggggtgagtgtgtgagtccagtggcacagggcgggggagggaggccggaccctgccacccatggagccttcagcaactttgttggttttttttcttttgagacagggtcttgctctgttgcccaggctggagtgcagtggtgcgatctcggctcactgcaacctctgcctcccgggttcaagcgattttcctgcctcagcctcctgagtagctgggattacaggtgcacgccaccatgccaccatgtctggctaatttttgtatttttagtagagacggggttttgccatgttggccaggctgatctcaaactcccaacctcaggtgatctgcccgcctcggcctcccaaagtgctgggattacaggcatgagccaccgcgcctggccggttttttccttttaaaaactatattaattaacttaatttcactacatagccttttttcctgaaagtaagtcatgtttttaattataaagataatataaggccattggaggaaaccccgtcccccactgaagcatgaggtccgactcctgccgcgctgcttccttccctgtttttaaatgttctcatgtttcttcacacagtcgtaatcactgtgaatgcccaatttggggctctgctgtttctgtttcgtgtcataagcattttccctgttgctgcctcatcttcataatcatccttttactttcctgcacgatgttacccgtagatgtgccatcgtctacttaagcattctccttttattagacatctctgaatttctgctaactgcagtgctgtgaatattcaccacgtctcctgctactatttattgagggtttatgccatgccaggtgccgtgacacatgctttgaatacatgatttctagtcctcccaacacctccacaaagtagcgactgttgttccctaatcatagatgagagaggagtcttggagaaggtaaataagcagcccaagctcgcacagctagaggcacaggtgggactggaaccccaagctgacgtgcaaactcctttgagcctccttctctctacccgggagggtgggactggaaccccaagctgatgtgcaagctcctttgagcctccttctctctacccgggagtgtgggtctgctctgtgccttgagcagaggctcattctgcgttcattcacacattcttccacccacacttagtgatcaactgcagtgtgccaagcacaccccttctcacggctgagaagcggcagtctggattcaaacccgtgtctgtgggactcgtttaccatcaggctatcttgcctctcccttcagccctccctggttggctgtgcccccaagtacagcacaggggactccacagccagtgtgttacaccaccaggctatcctacctctcccttcagccctccctggctggctgtgcccccaagtatagctcagggggagcaagccccacgcccacctcaacactcaagggtcagaatgagaagtgcaaatctaagtcctaggggaaggatcgatgattatgaacgtcaataaagggatgactgggcgggcacggtggcttatgcctgtaatcccagcactttgggaggccaaggcgggtggatcacctgaggtcaggagtttgagaccagcctggccaacatggcaaaactccgtctctactgaaagtacaaaaattagctgggtgtgatggcaggcacctataatcccagctacttgggagaatgaggtgggagaatcgcttgaaccctggaggcagaggttggagtgagtggagatcgcgccattgcactccagcctgggaacaagagcaaaactccatctcacaaaataaaaataatttaaaaaataataataataaaggacatgactccctggaactagatcatgtttgagatagttctgaggcagagatggcaataataagcacacatgcttctgcctgtcgtcctttgcgatggcagacattactaatcacatatgcctctgcctgctgtcctttgccatggcagacatcactaatcaactagggcacactttcttgctagacttggatgtggctttgtaatcctccacccagtgttgacccatgtgaccactcttgataagaggtggcatttggaataacacctgtattccattgctagcctgaaggatattgaacacggatagtctagaagggagggaggggattgtggtggggaataggaaaatgtgagcccagccaggaaggcttcgctcttcttgatacctaagtggtttgggatgtttgacaacatgagtcatctgggccagaagcctggtaaggtgaaggggcggagttgctccctgcgggcggggcggaccccagaacccagctttcatcactccagtgtgtgtttcccaatcaggctcctcaggagcagggatcgttcttgcttctggcgagttctcagtcaacccctgtcagtggttctgtggttctggacccaagagttgaggctggaagagccaggctccctctggctcatggctccctctggctcgtttgcaggaagcaccagcagtatgactgtaagtggtacatccccctggccgacctggtgtttccatcccccgaggagtctgaggccagcccccaggtgcaccccttcccagaccatgagctggaggacatgaagatgaagatctctgccctcaagagtgaaatccagaaggaggtgagcagagcttggtatctgagcctggggccctttgagccagctgtgttgggggaggtggaggcaggaagttgtaaggtttgagactttgagagggagccttgagtgtgtagttactaagggaaagaccccgactacagtagctccaagcagatcgagggggtcagtgctcaggatttcatagggctaacatgggaagtgccctggaaagcagtgcatgttgaacacgatagaaaggggaagcaagtagccaggcgcagtggctcacacctgtaatcccagcactttggaaggccgaggcaggtggatcacctgaggccaggagttcgagaccagcctggccaacatggcaaaaccctgtctctactaaaagtacaaaaattagcagagtgtggtggtgggcacctgtaatcccagctactcgggaggctgaggcagtagaatggcttgaacccgggaggtggaggttgcagtgagccaagaacatgccaatgcactccagtctaggcaatagagtgagattctgtcaaaaacaaaaaaaaaaagtggaggtagagggaagcaagagaagaaaaagcaggcttttgtaaggaaaagcaggacctgtgcaaggaaaaggacctgggaggcctctcagaaactgacagatcaagtaggcaaataaataaggagagagaggacctgaatgccacaattaacatgcttgacttaaaaatgcagagaagcttgtgccctgacagaaaactgagattcttgtcacacacgtttgggaccttcacatttatcctataataggccactaaggaaatctcaaaatttttctgcaagttgatagcatacaagtcatgttcacagaccacagtggagtaaaattagaagtgaacaagaatattggtcagcctgggtgcagtggctcacacctttaatcccagaactttgggaggctgaggatggtggatcgcctgaggtcaggaattcaagatcagcctggccaacatggtaaaaatccatctctactaaaaatacaaaattatccaggcgtggtggatcatgcctgtaatcccagcactttaggaggcccaggcaggcaggtcacctgaggtcaggagtttgagaccagcctggccaacatggtgaaaccccatttctactgaaaatacaaaattagcctggcgtggtggcttccgcctgtaatcccagctactcaggaggctgagacaggagaattgcttgaacctgggaggcagaggttgcattgagctgagattccgctgctgcactccagcctgagcaacagagtgagactgtctcaaaaaaaaaaaaaaaaaaaaaaagcattggtttggaaagttcaaactgacaaggtaaagaggaaatcaaaattcaaaatgagaactgcaaactgtttagtgctgtctggaaatgagtgtactacataccagtacccatggatgcagccaaagtgctgtttagaggaacatgaatagccctcagttcacataacaacagtgtctagaggaacatgcatagccctcagttcacataacaacagcgtctagaggaacatgcatagccctcagttcacataacaacagcgtctagaggaacatgcatagccctcagttcacataacaacagcgtctagaggaacatgcatagccctcagttcacgtaacagcagcgtctagaggaacatgcatagccctcagttcacgtaacagcagcatctagaggaacatgcatagccctcagttcacgtaacaacagtgtctagaggaacatgcatagccctcagttcacgtaacagcagtgtctagaggaacatgcatagccctcagttcacgtaacagcagtgtctagaggaacatgcatagccctcagttcacataacaacagcgtctagaggaacatgcatagccctcagttcacgtaacagcagcgtctagaggaacatgcatagccctcagttcacgtaacagcagcgtctagaggaacatgcatagccctcagttcacgtaacaacagtgtctagaggaacatgcatagccctcagttcacgtaacagcagtgtctagaggaacatgcatagccctcagttcacgtaacagcagtgtctagaggaacatgcatagccctcagttcacataacagcagtgtctagaggaacatgcatagccctcagttcacataacaacagtgtctagaggaacatgcatagccctcagttcatgtaacaacagtgtctagaggaacatgcatagccctcagttcacataacaacagtgtctagaggaacatgcatagccctcagttcacataacaacagtgtctagaggaacatgcatagccctcagttcacgtaacagcagtgtctagaggaacatgtatagccctcagttcacgtaacaacagtgtctagaggaacatgcatagccctcagttcacataacaacagtgtctagaggaacatacatagccctcagttcacataacagcagtgtctagaggaacatgcatagccctcagttcacataacaacagtgtctagaggaacatgcatagccctcagttcacataacaacagtgtctagaggaacatgcatagccctcagttcacgtaacagcagtgctagaggaacatgcatagccctcagttcacataacaacagtgtctagaggaacatgcatagccctcagttcacataacagcagtgtctagaggaacatgcatagccctcagttcacataacaacagcgtctggaggaacatgcatagccctcagttcacataacaacagtgtctggaggaacatgcatagccctcagtttacataacagcagcgtctagaggaacatgcatagccctcagttcacgtaacaacagtgtctagaggaacatgcatagccctcagttcacataacagtgtctagaggaacatgcatagccctcagttcacataacaacagtgtctagaggaacatgtatagccctcagttcacgtaacaacagtgtctagaggaacatgcatagccctcagttcacataacaacagtgtctagaggaacatgcataaccctcagttcacataacagtgtctagaggaacatgcatagccctcagttcacataacaacagtgtctagaggaacatgcatagccctcagttcacataacaacagtgtctggaggaacatgcatagccctcagttcacgtaacagcagtgctagaggaacatgcatagccctcagttcacgtaacaacagtgtctagaggaacatgcatagccctcagttcacataacagcagtgtctagaggaacatgcatagccctcagttcacataacaacagtgtctggaggaacatgcatagccctcagttcacataacaacagtgtctagaggaacatgcatagccctcagttcacataacagcagcgtctagaggaacatgcatagccctcagttcacgtaacaacagtgtctagagcaacatgcatagccctcagttcacataacagtgtctagaggaacatgcatagccctcagttcacataacaacagtgtctagaggaacatgcatagccctcagttcacataacaacagcgtctagaggaacatgcatagccctcagttcacgtaacaacagtgtctagaggaacatgcatagccctcagttcacgtaacagcagtgtctagaggaacatgtatagccctcagttcacgtaacaacagtgtctagaggaacatgcatagccctcagttcacgtaacagcagtgtctagaggaacatgcatagccctcagttcacgtaacagcagtgtctagaggaacatgtatagccctcagttcacgtaacaacagtgtctagaggaacatgcatagccctcagttcacgtaacagcagtgctagaggaacatgcatagccctcagttcacataacaacagtgtctagaggaacatgcatagccctcagttcacataacagcagtgtctagaggaacatgcatagccctcagttcacataacaacagcgtctagaggaacatgcatagccctcagttcacataacaacagtgtctagaggaacatgcatagccctcagttcacataacagcagcatctagaggaacatgcatagccctcagttcacgtaacaacagcatctagaggaacatgcatagccctcagttcacataacagtgtctagaggaacatgcatagccctcagttcacataacaacagtgtctagaggaacatgcatagccctcagttcacataacaacagcgtctagaggaacatgcatagccctcagttcacgtaacaacagtgtctagaggaacatgcatagccctcagttcacataatagcagtgtctagaggaacatgtatagccctcagttcacataacaacagtgtctagaggaacatgcatagccctcagttcacataacaacagtgtctagaggaacatgcataaccctcagttcacataacagtgtctagaggaacatgcatagccctcagttcacataacaacagtgtctagaggaacatgcatatccctcagttcacataacaacagtgtctggaggaacatgcatagccctcagttcacgtaacagcagtgctagaggaacatgcatagccctcagttcacgtaacaacagtgtctagaggaacatgcatagccctcagttcacataacagcagcgtctagaggaacatgcatagccctcagttcacataacaacagtgtctggaggaacatgcatagccctcagttcacataacaacagtgtctagaggaacatgcatagccctcagttcacataacagcagcgtctagaggaacatgcatagccctcagttcacgtaacaacagtgtctagaggaaggcaccacgggaggagcatccctgtgagtggaggaagggcctggagcggtttggtcagcttggtctgttttcctcacctctcaggttcagcttaggcctcaccacccctgggaagcttctctgacacccacgcccaccacagtcttggttgggtgccctgtccccagatcctgtggctttttgttcacctgtggctttgcttaaatggtactgaattgtaattgcattgtcagactcctctcttccccactggaatttgaactccagggacagcgctattttcttctgttccatgttcctcatattcgacacgtagaaaacaggtggttagggcccagcatggtggtttacaccggtaatcccagtactttgggaggctgagacgggtgggtcacttgaggccaggagttcaagaccagcctggccaacatcatgaagccccgtctctatgaaaaatacaaaagttagccgggtgtggtggtgggtgcctgtaatcccagccacatgggaggctgaggcaaaagaattgtgtgaacccgggaggtggaggttgcagtgagccgagatcacgccactgcactccagcctgggcaacagagtgagtgggactccatctcaaaaaaaaaaaggcacttagtaaacaaacaattattgaagaaaacataaccagatggcctctctgaggatcctttcaactcaagcatctccctttgaacaggggaaagcaagatcaccattacagccccaggagtgttcagggctgggggatgtcctaggacagagggtccaactggtggtacatctgcccagagggcttcctcgccagcacagctgtccccctcctgaacggctgggccctgcccacagtgcccgcccaggagcatcctgcgtgcctgtttcccacccgcccctgggaggcttgctgcctccccgttgccccagctgtgcagacgtggccttgtgcccagtcgagtcaacagtcaacactcagtgagccccactggctgtgctgcctggggtgtgccgggtgcctcatgtatatccctgtccagtggaggaagcagacacgccccttgctgaccacagagtgtggtacatgtgagtcactggagaggcacaggtgccgtcctctgagtcacagaagaagcagtgatttgttttttgttttttgtttttttttgagatggagtctcactttgtcactgtcgcccaggctggagtgcagtggcacaatctcggctcactgcaacctccacctcccgggttcaagcaattcttctacctcagcctcctgagtagctgggaataaaggcgtccgccaccacgcctggctaattttttgtatttttagtagagacggggtttcaccgtgttagccaggctggtctcaaactcctgacctcatgatccacccgccccggcctcccaaagtgctgggatgacaggtgtgagccaccgtgctcagccttgttctcttgataataattttttaaattttcatgttttttctaatccccaatataatactggctggttttaatgagaaatgctcgtagtaccagcatgtacagggtaaagctggtcgccactcacctcccactgctgacagtttgaggtgtattcttctgaactcttctttgcttatgctggtgtgcgcccgcgtgtccaatgagactagactacacgtgctgttttgcaacttcagcattttactccacagtgggtctttgagccctttggatgtatcagattctttttctttctttttgaggtagagtctcgctctgtcacccaggctggagtgcactggtgagatttgggctcactggaacttccacctcccgggttcaagcgattctcgtgcctcagcctcccgagtagctgggattacaggcgcccgccaccacgcccggtagtttttgcatttttagtagagacggagtttcaccacgttggccagggtggtctcgaactcctgacctcaaacgatccgcccacctcggcctcccaaagtgctgggattacaggcgtgagccaccgcgcctggcagtatcagattctttttaacaactgcctcctgctctgtcgcttggctgcatacaaatgtttttgggtgtttggattgtctctgattcttcgctcttagcaggcaagtcaacagtaaacatcactgcgcaggtgcctctgcagtaggttccctccaggtgggatgggcagggcagggtgagtgtgcgcttaattgacaggcttttacctctgaaaaagctgtgactggtggcattccccctgcggtgtgtgagggtgactgtcccccacagtgtcacaacactggctgtgaacattctttacaattttgccagtccagtgggttaaaaagaacaaaacaccatagaggtgaattctaactgaggagcttgaggatggccttgggagctgagacttgaagcataatggtggttaataaaagggagggggtcctttacgaaacagacagaaacttggaacattgagggagcaggctctgcccgcagaggatgaatgtctggtgagagggggaggctgagccgacgggacctggtgggttgtctgccgggcagggaggctggaaccctgccatgggggccttggtgccaggctagcaggtggggcttcaggctgaaaggtgtctgaggtttctttaagcaggtgtctctgttgtacccaggatttaatgtgtagaggcagcagagtgacagtacagagaggttaatactactgtaatatttgtattatttagggttctcaagagaaggaggcatagcaccccgcccagggccacgtggagaggtgccagctttgaacaggaggcaggaatggaaagaaagtgtggccacagcttttctgtggagaaacagggcagggaaagggcttggcaccagctggcttccgttatgtcggcagccctgggctagaggagtggtctctggtgacctggtccctggccctgggtgacgtggggcagaggagatgctggcttggcgagtgagcgtcaggtagagaaggtggttggggacatgggctctggatcagtgggtgtgtgtatgaaagctgtgctcatagggcatcactgacaggcttaggaattagtgagccctgtgggggagcagtttctcacccagctacccgcctctcctgccacaagatgtcaaaacatcacgaaatacggaaaatgtaaagagcatgttaacacacagtggagtgtcgtgcttagtgctgctcgtgagaaaggcccgagtgtgaggggaaccctctgtgtccccatctcctgcagaaagccaacaaaggccagagccgggccatcgagcgcctgaagaagaagatgtttgagaatgagttcctgctgctgctcaactcccccacaatcccgttcaggatccacaatcggaatggaaaggtcaggatgggtgggggtgggaccaagacagccccttccttagtccagagcagcccactctgtggctcctggccctgacctgtacgaaccggaaactcaggccccctcttcctgaggaggctgccatggctccagctgttgactcgctctcccctctcgtgtggaatgagtgccctctgctggccgtccctggcacagccgctcctgtcaccttggcttcccaggaaggagctcccccttcacccacccacccccagctgcctcctcctgcaaggtcagctgtgcctggataaggaggagctttgggccgggcacagtggctcatgcctgtcatcccagcactttgggaggctgaggcaggcgaatcacctgaggtcaagagtttgagaccagcctggccaacatggcaaaactctgtctctactaaaaacacaaaaattagccgggcgtggtggtgggcacctgtaatcccagctactcaggaggctgaggcaggagattggcgtgaacccgggaggtggaggttgcagtgagccgagattttgccattgcactagagcctgggcaacaagagcgagactctgtctcaaaaaaaaaaaaaaaaaaaagataaaaggagctttgttggggtccccaggatctgggagtacgctttgcctgactgtggtcacccactttatgcttatctcctctcttcagagttacctgttcctactgtcctcggactacgagaggtcagagtggagagaagcaattcagaaactacagaagaagggtaaattcctgcctcttccacgctccccaatgatgtccgtggcattgatgggccttttgtatttctaagcgtttcatgtccagtatcacgtctttggccctcgcagtcaccctcagaggtgccagggtgagcgtttaaggatgttacggattaattgagacccaaagaatctaactgattggctgaaagacatgatgatttagtcctgggactggacccagagcccagcctgggctttctctctctctctacctctctctctctctcacacacacacacacagagacacacacacacacacacacacacacatacacacatacacagaggctgggtacggtggcttacgcctgtaatcccagtcaggagtttgagatcagcctgggcaacgtggtgaaaccccgtctctactaaaaacacaaaaattagccaggtgtggtggtgggcacctgtaatcccagctactcaggaggctgaagcaggagaatcccttgaacctgagaggcggaggttgcagtgagctgagatcacagcactgcactccagcctgggcgacagagtgagactccgtttaaaaaaaaaacgaaaacaaaacgcatacaccacacacacacacacacacacacacacacacacacacacacacacacacacacacacaaacctcttcagttagattctcctactctgacccctctcgcagcatctacaccagtcctgctgtgtccacaaatccttccccctccctcgcaaggaccaagtctgccccagggattaagccgtcttcctgcagcagcccccagggaagagcagccggtcctggtggaccagtgcccacgctcccttctctctcggctctccctccagatctccaggcctttgtcctgagctcagtggagctccaggtgctcacaggatcctgtttcaagcttaggactgtacacaacattcctgtcaccagcaataaagacggtaagctcgggaaccagaggtggcccaaccggcaggtcccagccctcagagcgtggccggcttcccgtaaggactcagacagacatgtggctgtaaatggctgatccctgctcggctgtgctgagactgttgagtggccaggacacagcttgggtaggggtgactgtctactgagttcccagatgaccccagcttttccttgggcccctctgtctggcttgggagaactggcaccctggtgcactgagattgtgctgttaatatattcatgagagagcagacccggtagataaaatggtgtatgggaaatgaggctggaagtttccagggaccagctcttgaaaggccttgaatcccaagcaagggagtttggaattcatgctgtaagcccgggagtctgggggggttttgagcagtggggagctgtgatcagggctgggaactgaccggagtgggtgtattctagctgcctgtgtgctgggaaagggtccactttgtgaacggggtcctgaaggcaagctttcctcgacataaatcattagcagaatgatttatcatattggtcagttttcagtgccaggataggcaggatttggagggagagacagtacccatggggaatggtactaagtccctgggccaggatggtgggtgtgctggacccccccaggctgagtggaggagagaaggaccccctagccctaccccgggcagctcacatataaggccgccgtggccttcggaaactttttcatctggccaccaggtggtgatgttggaccaagactcagctgagtctcataccccgtctgcctcccgccggcctggggtggaggctgaggggatccgctgaccaccctctgccctgggggcttttctctcttgcagacgatgagtctccaggactctatggcttccttcatgtcatcgtccactctgccaagggatttaagcaatcagccagtaagtgccctggccaggacgaggttgggtgggccattgtggattctgcactgctctgcccaggatggggccctgccagcacgcctttagacatggggcattcccctggaggccagaaaccagctcctcttggcagggaggtcacccctggcctttgtctccaaagtcctctttctcaagccctccctgaagctgtctgaaacctaggggccgggcgcggtggctcacccctgtaatcccagcactttgggaggcccaggcgggcggatcacgaggtcaggagttcgagaccatccgggccaacatggtgaaaccccgtctctactaaaaatactaaaattagcgtgggcatggcggtggacgcctgtagtcccagctacttgggaggctgaggccagagaatcccttgaacccgggaggcggaggttgctgtgagctgagatcatggcattgcactccaccctgggcgacagagcgagaatccgtctcaaaaaaaaaaaaaagaaaccgagtgcgacaaacacgtggactccaacttcatatctgagggcgacaaacacgtggactccaacttcatatctgcccatgacaagctgtgtgaccttgggcaagtttcttaacctctctgggcctccactaaaaggcagtcacgcttgtgaattttgacccgagagcaggctgggatatgatcgtgtgtgtgcaacgctggtgtgctgccacgctcatcgctttttctccccttcccccttgtgggttcctcatactaaatctgtttttagtgtctcacaaagtaggattgcactttttaatttttaaaaaatttttttttagagacaggttctccccatgttggccaggctggtcttgaactcctgggctcaagccatcctcccacctcagcctcccaaagtgctgagattacaggcgtgagctgctgcgcccggcctggttgcgctttttatctacctgttatccacacgggaatctgtgagtcagttagacagctaatagtttctacccatttgccagaggaggtaaccgagtcacagagaggagaaaagacttaacatcacagaggatcagaaaccctgactctctccctctccacctgcccctcccactccctgctcttcactggcaggtggggtctgccctcacccctccctgcagcgccccacacagaggtgactccccgggccgttagagcagcctttcccaggaagcctccctgagttcctgggggcaaactggcctcccttctttgtcccttctttgtgcccacatcccctcaggttccttgtgcccccatcccctcaggttccttgtgcccccatcccctgaggttccttgtgcccccatcccctcaggttccttgtgcccccatcccctgaggttccttgtgcccacatcccctgaggttccttgtgcccccatcccctcaggttccttgtgcccccatcccctcaggttctttgtgcccccgtcccctcaggttctttgtgcccccatcccctgaggttccttgtatccccatccctttgaggttccttgtgcccccatcccctgaggttccttgtgcccccatcctgctcagggcaagctggttatggcacctgtcatgctgttttgtcacttaacaatttgcgtctcccactgtgagttctctgagggcgggaaccaggtctcctttaccctgggatgcatgggagctcagaaatgtggaatgaagtcgttaatttacacagcacctaccgtgcacctggagaaggtgagaacatggctggcgtgtggacgtactcacatgtgcaaagcctgtggcgtgttcagagcctctcagtctcacggtccgctctgagcctccggcatcccgccgaggtcacggaaaccatccctgttttacacacgaggacgccgaggctcggaggggctcaaggttccttcctggagtcacacagtagcaggtggtgcagcagaatccacgtcttccggcaccagagccggagctctaaccttttgggcacttctcgatgtctggccgggaacaccacacggtccctcaggctgcttgttaccgtggaagcttcctgaactctctccagacccacagacctcccttcttgggggctgccgctgaggagcttctggctagtgagctctgaagcactgtcccacccatgtctggaccaggcgccaccactccatgtccccagatgccgcccctccctctcctgcttcccgttggccgggaggtcctcgcctcagggagccgacccgtggcctcccagcctgggcgggtgtcagagccggctgagctgctccaaaatctctctttacccccagattatcctcactcccttcgccgccgccacccctgacccactcatatgtctgttctcactcagaggtgaggccctgtgtcttcagccgtggtaaactcaggacctctggacaggcaggcccagggtgtaggcaccatgacttttcctgctgtgcagacaggaacctggggagagaagggaggtgatctgtgcagagctggggtgtggacccagatggtctgactccggaaccctcgctctgaccctgtgagccgtccccagctccttccggaaccctccctctgaccctgtgaaccctcccccagcccgttccggaaccctccctctgaccctgtgagccctcccccagccccttctcgaaccctccctctgaccctgtgaaccctcccccagccccttccggaaccctccctctgaccctgtgaaccctcccccagccccttccggaaccctccctctgaccctgtgagccctcccccagccccttccggaaccctccctctgaccctgtgacccctcccccagccccttccggaaccctccctctgaccctgtgacccctcccccagccccttccggaaccctccctctgaccctgtgacccctcccccagccccttccggaaccctccctctgaccctgtgaaccctcccccagccccttccggaaccctccctctgaccctgtgagccctcccccagccccttccggaaccctcgctctgaccctgtgacccctcccccagccccttccggaaccctccctctgaccctgtgagccctcccccagccccttcctgaaccctccctctgaccctgtgacccctcccccagccccttccggaaccctccctctgaccctgtgaaccctcccccagccccttccggaaccctccctctgaccctgtgaaccctcccccagccccttccggaaccctccctctgaccctgtgagccgtcccccagccccttccggaaccctccctctgaccctgtgaaccctcccccagccccttccggaaccctccctctgaccctgtgacccctcccccagccccttccggaaccctccctctgaccctgtgacccctcccccagccccttccggaaccctccctctgaccctgtgacccctcccccagccccttccggcaccctccctctgaccctgtgaaccctcccccagccccttccggaaccctccctctgaccctgtgagccctcccccagccccttccggaaccctccctctgaccctgtgaaccctcccccagccccttccggaaccctccctctgaccctgtgagccctcccccagccccttccggaaccctccctctgaccctgtgagccctccccagcccctcgaggaggggctcacaccgagatcaatccatgatgacagcacttcatggcccgtctcaaacacacaggcccactccctggtctggcccaggctggggtgctcagggcctctgtgttgttcacctgcaaatccccagccccgttctgtgtgttctgaggcccacctgggtcttctttctgttgctccagctggaggcttcttggggtagctgcactgtcctttctgcaggaaagctggtttttttggtttttttttttttgagaaagagtcacttggtcgcccaggctggagtgcagtggtgccatctcagctcactgcaacttccacaccccaggttcaagcgattgtcctgcctcagcctcccgagtagctgggactacaggcatgtgccaccacgccgggctcacttttgtatttttagtagagatggggtttcaccatgttggtcaggctggtctcaaactcctgacctcaggtgatctgcccaccttggcctcccaaagtgctgggatttacaggcgtgagccaccttgcccggccaggaaagctgttctgatggagaatggcccagctgggcagctgcaggggctaagtggagtaagccacctgcactgtatgcccgcactgtgacctctgacgttgtttcacgctgcagagggttggccatagtgtcccaaaggcacctcccacaccacctctggtaccctgggaacaacctcggcatctccctggaggtgggaggactgctggggtccgagcccagggcgggtgtgggtttgcagagggcctggggtccgtgccggtgctgtggcctcagcagttgggtcccaaggtagattttcagcctgaaggccagggtggaagatggaaatgccggggaaagcccccggccctgccctcccgccccagccctccactgccttgttacctggagcgcttggtggtggtgggagcctcgttcaccgtgtgccagctgggttcccagccctgttcttggtactgcgggtacaccggcaggcaggaaaacccaggcttctctccacatggtgtttacgtcgtggggggagagagactagggacgcacgagtagagaagatccctttggtttatgttaagtgcagcggaggaaaccacagcaccctgggcttggggatgtgggcgttgttggtcgtcaccgcggcaggggatgctccgagcattcaggacccagaggcagggctgctaaacgcctcccaccccaaatgccgctgttgaggcctgggcacccatgttacggggagaggtggctccagggcggtcagtgaagagtttgtggtgtcgtctccatggtgaggaagatgtggagacggaacagtcaagggccctttagagggaggaggaggccagagtgtggggagggccgaggtgggaagggcagagtgtggggagggccgaggtgggaagggcagagtgtggggagggctgaggtaggaagggcagagtgtggggtgagccgaggtggggagggctgagcccctaagaagggggcaggggagaagccagatggtcccgggcttcagggaggagagagccaagatgccatccgtggggacgttggaaaggacagatgcgatgtccccctccatcctgagtgccgccccagctgccccaccctggccccactcactcagtatctccgtctgtccttcccccacagacctgtactgtaccctggaggtggattccttcggctattttgtcagcaaagccaaaaccagggtgttccgggacacagcggagcccaagtgggatgaggtgagtggcaggggctggcatctctgtggggaccccaccaccccgtgctcgtggcttgtctgctggggacggccagcccattggttggaccagctatgtctgcacccccctttctgctccctgctcctctggcttctgatcgcggtgtgtgtctgggtgtcagaccctgtggtgtcagctcaggcccccagactccaggggtgatgggaggcctctgggagctccagaaaatctgacgtgtccttcgtgggccgtgcttactccctcctccttgcaaagctgaggcacgcacctgccggaaagccaggcctcccagcttcggaggttcagggccctttgtcccatctttccccaggagtttgagatcgagctggagggctcccagtccctgaggatcctgtgctatgagaagtgctatgacaagaccaaggtcaacaaggacaacaatgagatcgtggacaagatcatgggcaaaggacagatccaggtgaggccagggcgccggggcgaggctgagggagcctccaggaggtggttccagttgaaaaggaattctggtcaaggagcctgctctttcgtgattttggttccaagctggttggaggaaagttcccaggaggtggttctcccctccctgctagaggtggctgcctgttgtggccccggaagcccaggcgtgtgcgtggctcctcaggtgggtcatctgcgcttctgcaagatggaaacaaccagctttgttttcacacgccagctttagtctatgggtggttgtttcccggaacgccatgttgagaaggactcagaggctgcgtcggtgaacgggagggaggaatgctgtgtgtgaggagccgtgtctgccattgacgggggaccggagttaggcacacggaccaggcgtttgctcttctgcccgaaagacttagggtcctgctggttggcttggggggaggggggtctctgacttgttgttagggtggccggaccttactcagctgcgttgggagtctgtggcttcgggtggggactctgggtgttagtagaggctgcacctcgggttaagggtatttatgcttctgggtgcggtggctcacgcctgtaatcccagcaccttgggaggccgaggtgggtggatcacgaggtcaggagttcgagaccagcctggccaacatggcgaaaccccatctctactaaaaatacaaaaattagcaggtcgtggtggcgggcgcctgtaatcccagctactcagtaggctgaggcaggagaatcgcttgaacccaggaggtagaggttgcagtgagctgagatcgcgcctgggtgatggagtcagaccgtgtctccaaaaaaataaaaataaataaaaacagcatttatgcctcaactgtgcttttggctccctataaacatatatagggaaaaggcctctgtgtgtgcagcctgtgtctctgaaacattctgccaattttgaagatggctgctattcaccaacctattaagagaagtaggcttgggagcgggaaaaggcgtgacgtggtggagccgctcacactcccgtctggtacctcgtgtggcctcgtgctgtgccgcaagtggtctggtttgggggtagattctgtgaccatgaaatgaagggagacggtaactgacccgtactgaggttgagcctcgggcgttgggcgtgctgagcttcttgacagtggccgcagacgtgatccaggcacagctgggcgccgagcttcttgaccgtggccccggacgtgatccaggcgcagctgggcgccgagcttcttgaccgtggccccggacgtgatccaggcgcagctgggcgccgagcttcttgaccgtggccccggaggtgatccaggcggcagctgggcgccgagcttcttgaccgtggccccggacgtgatccaggcgcagctgggcgccgagcttcttgaccgtggccccggacgtgatccaggcgcagctgggcgccgagcttcttgaccgtggcccaagaggtgatccaggcgcaggctgcgatggctccgtctacaacagggagctgaacgatgctttttagcaggaagcatttgttctctgatgcattgtcatggccaccgagtttggtatctggctcttacctgcaggtccttggtagcattgcccctggggagctgtgtgggtctcccactcgctgccccatctcaggctccagtgtttgaaccaggggccccacgtggaggggcctggcctctgccgcatacgccccgtgttcctaaacacgtctctttccgatgctgtggggtctgcaccctgcttctcagtactcgtcactagggagacagggctgccaggcaactgccagccagtccttcgtgatttaggaaatgggctctagagattcagtccctgggacctgctctctgtggggataaggggagggagccccatctccctgtccctgggctgggctagagggacaggcacggaagggttctgggctggcctgtgcagccccaggagacgcccaggcaagagacgagtggtcgccacgccacactccctgggccactggtggctgtggaatagaagagttacaaggatgtgccgggcagccagccccgtgggcacggtgggccccagcccctcgagaactcagctcccaaggcccgagggcacattcccccacctggacttcagccccattgcttccctccttctcactcagctgcacaagccccgggggaaacacaccatcagtcactgcaagcctcttggagacaggagcagatggaggcagtgggggagggaggaagccaggttatgtttggcaaagcagaaggcagagtctggtaaggaaaatgtttctgtgtttaagcttcgaggaatgttaaatgcctgggagttgatattaaaagaaacataaaccttcctgctgccagctgacctgggcctgtgagcggacagttcagagccagagtcccctgcaggcctttgaagtcccccagcactcagcatgccaaggcccggccctggccctccgctgcagaaccatctcaccagcctgcctttggtgggggaggcatgccccaggggcgggctgtggcttagaaagtctcgccccgtgactgccctcagagccaccgtggatggccaggctgggtgacgagtccacacggagctgttcccacgaacccgggccccacggagccacggaacggtctgtccccacagcttgtctctgccttcactccggccacacatctaaggaagggagctggcactagcctctggaatgcagtctttctgcccgccagcaggcgctgaggacatagtcggaggtggctttgagatagggcccagccctcggggatattcagggggcctgtaggaaaggcaggaggaggagggcagtctctgaggcccccacttctctctaagccccctcccagcagcccatccagagaaagcaaggggccctacggcctaagcgcaggcatttgctgctgtgatgaggcccccactctgggtcgcctgatggggcagtggggcaggagtctcagcggcggggtggggtgggggaagcatttagtgacagacagacggcagcatgcgtcaccaatgtgtgtccagcacttgtgctcctggaggccgcttcccaaatgccatctcctcgtgtgatccttgtcgtgatcctccagggagaatgacagtccctcctccccatcttacagatgaggacactggggtactgaggttaagtaccttggccaaggcatctctgcgtatggtatgtgggaaaggccatgttccctcctctgtgccatgtccccacgtctcaggcctttgtcaacgaatcccccagcccggacagagggccgtggcatggctaatggcctggagaagcagctgaggtgctgctttatggcataaggtgagcgtcctttgtcttggagtcctctgggcaggggacacttgtgcctggtgcccctgggaggaaggagaggagcacgtgcgggaaagagcaggaggccgaggtgggctgatcacgaggtcaggagttcgagaccagcctggccaacatggcaaaacccctttcctactaaaaatacaaaaattagccaggcgtggtggcacgcgcccataatcccagcactttgggaggccgaggcgggcggattacaaggtcgggagttcaagacccgcctggccaacatggcgaaaccctgtttctactaaaaatacaagaattagctgggtgtggggcccacgcctgtaatcccagcactttgggaggccgaggcgggcggattaggaggtcgggagtttgagactcgcctggccaacatggcgaaaccccgtctctactagaaatataaaaattagccaggggtggtcgtgcgtgcctgtaatcccagcacttcgggaggccagggcggggggatcacctgaggtcaggagttcgaaaccagcctggtcaacgtggtgaaaccctgtgtctactaaaaaaacaaaaattagccaggcgtgatggcgggcacctgtaatcccagctacttgggaggctgagggaggagaatcacttgaacctgggaggtggaggttgtagtgagctgagattgctccattgcactccagcctggacaagacagaatgagattctgtctggggaaaaaaaagaaaagaaaacagcaggaggggtacttagcatgcgtctgtgaggtccccagcccaggagggggtcctggcctccagggacccactgtcagattggaaagacgagtatattggtccatgttctccagtgagaagaatgctagatgtcagccacaatagccgtacacacataagcgagcccaggacgagcccagcacggtgctaaatgcttccatctgctgtctcaggagatcttcccaggaccctgtgggagaggaatatcatcacagctagaaagatgaggaagctggggctaaggagcccggacaaggccatgtgcccaggagtgggccagggcgggcagctggctgcagagcccatttctagatgtcctgctgcctcctgctataagaagacggaagattgtcctgctgtaagaagacggaagattgtcctgctgtaagaagacggaagattgtcctgctgtaagaagacggaagattgtcctgctgtaagaagacggaagattgtcctgctgtaagaagatggaagattgtcctgctataagaagatggaagattgtcccgcaggaattcagaggcagaaaggtcaccatgggctggaattagggaggcttcaaggaggaggtggaacgagagcgatttggaagccctgggttttttaattccaaaagcaatgtttgtatgagaaagaaaattgcagtagaagcaaagagacttgaaacctaatcagaaaccatccttcctccggctcctccgaagcagccagtttattctgtgccttttcccttcttgaggtatacacatttttatgtagatttaatcagggcctgttttgtctgtttttctgttttcatggattattataaacctccttttctctagagctgtatggagtcttcttaagcacctttttggatactttgttaaaagtactttatattctttgtagaaatcttggtatagagcggccagcgcaattgctatgctaaggctctgtgttattccagcaaggtgcgcaggctccgcttccgcagaagggagtagggtgggagttctggaggacagacccgcctggcagggaggcacgaatgtgaagggagggtcccaggaaagtcaggagcctcagcaggggtggcggggagctgcaagcaaggccagtagaaggaatgaataaaaggaggggattcctgggggtttggccggaagaggtattttttttttttttgagatggggtcttgctgtgctgcccaggctggagtgcaatggcgcaatcttggctcactgcaacctctgcctcccaggttcacgccattctcctgtcccagcctcccgagtagctgggattacaggcgcccaccaccatgcccagctgatttttattagtagtagtagagacagggtttcaccatgttgaccaggctggtctcaaactcctgagctcaggtgatctgtccacctcagcctcccaaagtgctgggattacaggcctgagccacggcacccggcctggaataaatcttagagggcgtttaatccaatcctgttttccggagagaaggaaatggacaccagcaagggtgagcgaggcagccgcggtcacagagcttgttagtgggtgaacaagggccccagactcagggaccccatccaggtccgcttagctgggagccccccctccaccggctcttgcccctgcccccggcgtagtctgccctggctcctggtcccaggggactccactgtgtttatcctactctatttccagccttgccgctccagctgcaacctacccgctagctgattagcatattcccagggtccggcccttcttggcgggctgggcctgaggagagcgctttcccttggggccccacagctcagtttctgccagcgtccccagactggagaagggcctgagaccaagaagctacttaaacctgaggggccctctgcaccccctgcccgccccccggccctgcgtcattccctcgctcaccgcaggctggggacagcccccaccccacagtccacctctgctccctgtgcctgggaggcagctccacttccccacgtgcctgccagggcagcccctccctgggcacagcagcgctgaagaccctgtggtgggaggggcaggttccaggccaggaagggagtgtgagccaccgcgtccggcctttattctttttaaagaaaaaatagtggtagaagccaggcatagtagctcacgtggtgtagctgtggactacttgggaggctaaggaggctagagtgagctaaggattgcgctactgtactccagcctgggtgacagagcaagagtctatctccactgaaaaaaataaaaaataaaagattgtagtgaaatatacataacataaagttaccattttaataaattttaggggccgggcgcggtggctcacgcctgtaatcccagcactttgggaggccgaggtagatggatcacctgaggtcaggagttcaagaccagcctggccaacatggtgagaccccatctctacaaagattaaaaaaaattagccgggcgtggtggtgcacgcctgtagtcccagctattcgggacactgaggctggagaattgcttgaacctgggaggcagaggttgcagtgagccaagatcatgccactgcactccagcctgggcaatagagtgagactccatctcaaaaaataataatttttgggtgcacagctccgtggccataggtggatttggtgctgtgcagccgttgccagtgtgcatatccagaacttgttggccctccccagccgaaaccccatccccattaaatcataactccccactcctgcacccttagcctccagtaaccacctgcctgctttctgtctgtacgaatttgtccagtctgggaaccttacgtaggtggaatcagacagcatttgtcctcctcatgtccttgagcttcacccatatgccgttgtgtgtctgaatttcctccctttctgaggctggatacaatttccctggatgtagatgccacgtctctttatctgcccgtccgtccgtggatgtaggtgccacgtctgtttatccgtctgtggatataggtgccacatctgtttatccatccatccgtccgtgaatgtaggtgccatgtctgtttatccatccatccatccgtggatgtaggtgccacgtctatttatccatccatctgtggatgtaggtgccacgtctgtttgtccttctgtctgtccgtggatgtaggtgccacgtctcttcgtccatccatccgtctgtggacgtaggtgccatgtctgtttacccatccatccgtccatggatgtaggtgccacatctgtttatccatccgtccgtggatgtaggtgccatatctgtttgtccacccacccgtggatgtagctgccacgtctgtttatccgcctgtccatctgtggatgtagctgccatgtctatttatccatccgtccgtggatgtaggtgccacgtctgtttatccatccgttcgtggatgtaggtgccacgtctgtttattcatccgtttgtggatgtagctgccacgtctgtttatccatccatccgcggatgtaggtgccacgtctgtttatccatccattcatggatgtaggtgccatgtctgtttatccgtccgtccgtggatgtaggtgccatgtctgtttatccgtctgtccgtccgtccatccgtgcacatttgggttgtttccacccaaaacgctcttgcctttcgttgagaaaaagaaccttgtccctgaggatggagacagcacagcctccttctctccagacccaagctctgtcccccacctgcctcccagctgtaatagatgagcaggacccgtgaccctagggcatgactggtcactattagtctcctgtagttgaagcacacagttgggccccctgcctcggccttctctccccctcccggccaagtgtccctgccccttgaccccttcacccttcttcctgggtcagctctttcctcccctggtcagtggtttaggtgcatcgaatgcagacgcagtcaccctgaggccgcgggaacaacctctggtcccttgacttcttggcatctcagtttcttcttttatttatttacttatttatatttatttgagatggagtctctctctgtcgcccaggctgagtgtaatggcgcagtcttggctcactgcaacctccgtctcccgggttcaagtgattctcctgtctcagtctcctggttagctgggattaaaggcgcccgccaccatgcccagctaattttcgtatttttagtagagacggggttttgccatgttggccaggctggtctcgaactcctgaccttgtgatccacccgcctcagcctcccaaagtgctgggatgacaggcgtgagccaccgcacccggccaagtttctttattgattcagtgggggtaactattcctaccccaccttcagcactggcttaaaggatctcacatacctggaagagccagtcggtgctgtgacgtgtgcgtccacgctttcacctgttcactcacttgtttctgtttacgatacatcctctgaatggcaggccctgggctgtgggtacaaagaatgaccaggacctcaccgtctggtaaagaaaacaagagaacttaggccaggcacggtggttcatgcctgtaatcccagcactttaggaggccgaggcgggcggatcatgaggtcaggagttcgagaccagcctggccaacatggtgaaacgccgtctctactaaaaatagaaaaatcagccgggcgtgatggtgcgctcctgtaatcccagctactcgggaggctgaggcaggagaatggtgtgaaccaggacccaggaggtggaggttgcggtgagccgagattgcgccattacactccagcctgggctacagagcgagactctgtctcaaaaaaaggaaaacgagaacttggatcgttagccagtgttgccggggttttgaggccagacagatcttgcggggctgagtctagctttctccatcgttagttgggagaacagagcgagtatctttgcctctgagcctcagcttcctgacctgtcagatgggctgtaagaggactgaatgtgagggtccatgaaaccctggacccggggcctggcatggagtcagtacgtggtttgccctaagctggcgggttcaggcaccctgtcccccacccccttccagtggttctgggtgtcacttgtccagcagccccctcctaaaggctgtcacctataagtggtcccctgggtcggggcctttggctggccgaggcagcattattttcttaagctgatggggtcagactggctttgctgaaccaacctcatagcaggggcggggaagtcaaggctggggccctcaatgccggctggcccgaggtttccctgccatgacccagcacggcagctctgagcttggcctggtgtggtcggaaacaaggggcctttgtcagcggctggggagcagcttctggtttcaattactctggagagcacgaggaagcttgcagagaacgtggggccggagcccgccagggcaggagtcaagggctcccctgccccacttccctccctctgacccccaaggggtgtcttgtccccattcgaccctgcctgagggtcctgcgcgtgcgtcctgggggccctgggttgtgagcccagagccccttccagctccggccccctctcgttcttcatagtggtactgggacccctcccaggaagatgatcgacggccggtaacgtgggtcctcagtgcttccccgttccaggcctcacgcgtgggccacactgaccacagccgggcccctggccctgagggaggccttgattcaactgggaaggaacacaggcctttccctttggttccatctctcccgtccccaacccctgccctggcactcacagcccccatagctccctgtcgtgggacaccggagtgacctctccctggaagatcagcccgcgtcggcgcccgccaaggccaggagtgcatgtcaggccccgcctcggctcctggcttaggagttccgcctccctgctgcttgccaccctcacagctggcccacgtggggctcttccctctgccgccacccccacccctgtgccagttccccaggcacatagggaccgtggaggctgagccccaggcctggttctacttcctgctgactctccacttcctcccagggccccgtgactgcagccattgtcctgctctggccctgcccaccccagctgtttcgggcacatttgttctccagcccagactcccacctgctgtccctcttcaaggcaggtctagacgcctggttctccttggagagtgggcagcagagactgtcctgggtgggggaagtcgggggagggtccctcgagagtgcctgccctgccgtcgaaagcttttccaaacgtggggcacgaacctctctcgtcagccctgctcagctgcctccatcgcccaggtgttcctgattttgggagcctggactctgcccagtggattctgggcaggaagcatccagcaggaagcagatggaggtgtgagtcggctccccccgctcccctccacccctgggaagtgccgcctcagcaggcaggcttggcgcccgctccccctgacccgcctctgaagggtgggcaccatgcagagaagccggtccagacaggacctcaggagccgatgcagtcaggccctgagaacatccagcctcccgacagaccaaaaaaaggtgttctcagctctgggtgccgggctcccagactcagaggcacgggacctgggtttgatcttagccggccaacctcgggtgacccttcagagagtgtcctctcgggtccgtggcattcagcgaactcgccgaggcgaaagccgcagacatagattcctccccgtgagccgctaacctccctgctggcggaggctgctgcttcctcctaggaatccaaaggatcagctccagggttgtcccactttccgtgttttctgaaagcttcaagagaaggatgccacagaagggttgccagagaatttcttgagttagggctgaggctgcagatgaatgctgagcgggggtcacctttagggtgggctctgctggcctccctcaagcctgcggccaccgcagactcacagcagcccctcgtggccagccccgcccttgccgtggcctgggggcgtggacattggtggtgctgggcgagggtctaagccccagtgtagcctgtagctttgggctggggcagggagggatgggcacaccgtgttcacgccctcggaggcaagtgctgagctgccctggcttcaggaaagaccctagcgcggctggagacgcaagatgacccagacacacccgcctgacccactagacaggtgctgtcccctctcgaggctgccagggcgaacccacagccactgagcaaaagccctgagtttcccaaaggagggagagaagcagagacacgactggagctgcaggttcagcgtctgacccagaggtgtccttacaaagcccctaatctctcagacccccacgtcccccaccccgagggagagcgaggccttcgggagaactgcctctaggagctgctgggaacctaaggtttgagctgtagatgcctgaaaggagggcggggcgctgaggtgtgcctcagattctgcctgtggggcgtgggaattccggggagggacgtgagccccaaggcaggcgaggggtggtggaaaagcaggtgtgagccagtgggccccacgtcccctcttcagccagggcgcctgctctctctgcttctgcttttatccgacgaggtgggcagggagacgtcggcataaaatttcatttggaaaaaacggcaggggtgcgtcctcagcagaaaagaaatctcaccggagaccatgtgtctgttccgagctcctgatttgacagctgtggaaactgaacccagagaaaaacacagccgttgagtccacaggtccctggctcccagggctttgcttctggccaccatgagctcggagcttgggtggaagggaggtgttcgggaatccagaatgaagaaagagcagggaggctcggcgaccccatcccaccttcaggcctcagcccctcctgcctcaggctgcaatttatggctgtgctgggagacccggccacaccccctccttcccgggaggaggagcaggcaagcagcccaggggggctccagcggtagggacagcatactgaggggccacgccctgcccactctgtccctgggtgagttttgttctagataagcaagatgttcccaaaggctcaagtgcatttttcacccttttccatgaccaaatgtgctgtgagaatcgctagggtttgccagggacgggctgtcgggacacttctcctgcagcagacaagctcttgggctgtttcagcctctcctccgtacctagaaccaccgagcaccctggcgacaccagcctgacgtggccagagagaggctggaggtcaggcagagggaggctggagctgtgtgagaagcagcacgtactcgggactgccctatgagccggcacaggcctttggggagttgggaggacagcaggttaccttgggcaggcctaggtctgggccgtagagcaactgatttcatcctgactgccttcttccttacactgtgcccatcttcaaccttgagcccaccctggacccctctcccagccccacctggatggatgggtgggtgggtggatggatggatggatggatggaaggatgggtgggtgggtggatggatgggtggatggatggatggatgggtggatggatggaaggaaggaaggatggaaggaaggaaggatggaaggaaggaaagaaagaaacaaacatagctcctagggtctaatctgccattggctgctgggtgactcctgtccccaggctgaatgcaggctctgaacattgcaaatacccagaggtatccgatgggtggggagaaaaacctagagtgagtctcagtgtctcattctgggaagacatttggccttccagtccgcaggttttggttagggtcggtacaggaaatggtcagaacacacagtaagaatgcagtgaccacagagccaccgagttgggggacactcccgtccccactcccccacagctgtccccggaacgtgccatcctcccgcccaactcgcacgccctgtgtgggcgctgggcaccccgggctcccatgctcggcctgcttgtctctctctcatcctggagcctgcacctgtctttgggcaggagccactggcaggctctctgcagcccccaaagcctcgggtccgccctgctctcctccagcaccttcttgccccccagcctcgggtccgccctgctctcctccagcaccttcttgtcccccagctctggtcctctgatgcccagccggtgccctgatcctctggtgctgagagagggagtgttcttggcagacctgagccacatcccctcggtccccatcctcagctgggtgccaggctcctcctgggctctggactctctgggcggcctcttggggctctccccgccccaactggctcccaggctatccccactggggcgcctgtggccttggtctagctggctgctcagaaaccccctctcctggagtcatttgcgctagcggataggacgaggaatcggggttcaagtgtgggctgggggagaggagcgtcgttctggtgggaaaaaggaggtcactccaggaaagcggcagctgcatttctaggttctgaggcagaaccttcctcctggtgctcacaggctggaggatttgcctggaagccgtccccacccccagctgtcaccgaggcagccccactgcagcctttgcccctcccgctcgcacagggcaggatgtgaccttttttcctcgttgatgccgccactgaacaccttaacccgattttacctcagtcacagctgtgctgggtggcatgaccccctccctaggtgtaatgcggggtcccacccacgtctccccggggacagcccctctcactccccttgcagagagcctggggaggggctgagggaggatgggatggtccactaggaatgtttttaattccaaaggcagtgacatctgttcgtgggggccttaccaccaggctctgtttatccagccgggggagtcttgcaggtcgtctgaggagggctctggcaggtgtgggggatggaaggggtggggggagcaggtgtgggggatggaaggggtggggggagcaggtgtgggggatggaaggggtggggggagcaggtgggggtagaaagggtggggggagcaggtgtgggggatggaaggggtggggggagcaggtgtgggggatggaaggggtgggggaacaggtgtgggggatggaaggggtggggggagcaggtgtaggggatggaaggggtgggggagcaggtgtgggggatggaaggggtgggggagcaggtgtagggggtggaaggggtgggggggagcaggtttaggggatggaaggagtgagggaggaaggagagtggccccttcccaggtggttgggatagcctgagctgaacccagcagagatgaggaggggtccgtggtgggctgcagcgactagaattcagacttctgcttttgctggggacatctgtcttgcacagatcttcttccacccaagaccattgactccaggaagcaatgagtcgggcttgggggagagaaggcaagtctgcgctgtccccagaggaagcccccagtccatagggaggaagggaaagatgagcgtctcaggggaagactcccaactcggctacccatctgcgaaggcacttatgtcaccatggagaccagctggccatcgttcatccagtccgagcttgctttacctagacaagtattgagcctgtggtacctaagacagatgagtgccgggccttgggaacgggattcacacggcccccttctcccccacacccggcggcagggaggggcgtgcattctcgcagtctgcaccctgtggcctgggacccagcccgagggaaggggaccataggccagtgaggggccgattctgaagttaagtcacggcaccaggagcactgtggcgcaaacgtggagagcagttataatggcatcctaccagccagttacatgacagccattgcacgtttgctggagggaggtagagtaaagctgggacccagtgagggtggatggcctttccctacagccccgagggccccacgctgacccctctcctccaggaagccttccccagttgcctccagctggaaattgtatctctcgatgttcgtggcattttgtctgtcctgttctgaggccgtaatatgggattttgtgcgggttttgtccatctgggcgtggtgcctagtaggtgcacaagtgacccgtgccaaatgcacaaatgcttgtctgcctcctgttgatggacatctctgctttcttggctgcccctttgtcaagcactgacttttgattcgtctctgtgatgccttaacccccaccccagggtcgggcacgcagccaggccctcagtcactacctctagagtgacatgagtggggccaggtgcagtggttcatgcctgtaaacccagcactgtgggaggctgaggtcaggagtttgagaccagcctggccagcatggtgaaacctcgtctctgcgaaaaatacaaaaattagccgggcgtggtggtgggtgtgtgtagtcccatctactcaaggggctgaggcaggagagttgcttgagctggggaggcggaggctgcagtgagccaagattgcaccactgcactccagcctgggcaacagagcaagacactgcctcaaaaaaaaaaaaaaaaaaatgacatgagtgggaccaagcagtggggcctgaggagtgagcagagccttcctggaggagatggctttgtggctgtgtgaaggggctgtctgggtcctcctggagccctggaaggggcaggcgaaggaggggtggagaagggtgactgaggcctcagttaggggacacaggcatgttcctacctccgtccgtctctccacctccccctcaggcggtgctggtgaggctgttgtggctcagcccccacttagcagctcaggtttgaggaagttccgtgtgcaccgtccaggggtgcgtgtgacgtgtgagccaggaagaagtggagctggtctggccgcccctgcagggacagtgaagactgaggcccggttctagcccaggcaggacgccccaaggcccccctccaccagccaggtggaagatagtccagggccagatcctgccacactagggcatcacagtgagtgacaggggtgtgggctttggagttagccagacctccgtttgtgttccagcttgtcctggccttggacacgtagctcagcttgtcagagcccttcgtttcctcagaggtaaagcggggatgctggtactgacttcatacagttgggaggggtaagtgacttaatccatgatgcctggtccctgccagccttccacgaaggacagctctgactacggctgtctctgcagggaagccacctattcctcaaaaacaccaaggcctctgaggagaaatcccgacacctgcctggctggtgacgccggatgccgagggctcgtctctgggccccgacccacctgccttggggtcaaccaagaaatgtcctgacccagctctttttcctgaatccaaagcatcatccatgtttgagtaaggcacagtgcttgtgagcaccaagggctttggagggacctccccatcctcacttggcactgtgtaaccctggcaagaactggacctcctgaccccctgtcctcacctctctagaacagggcagtaacaccaacatgacaagaatgtgaggctcacatgcagtcgggcgtttgaaagacctggttcgcggttgccacggtgcaaatactggtttcctttctgtgccgtgctggggtctgcagaggtccgaggccccagacacccctgggttttgcatagttaaacatttgggattcagcctttctcttttctctgaataccgtactctaacttgcactgttaccttgagacgtaatttgtgtcctagtctctgcggttagaaagttcactaaataaattgaaggtcaagaacaagttcttctctctctcaaggcgcccagcacggacacgggtggttgcccgtggcgtcctctgcgcccagcacggacgcgggtggttgcccgtggcgtcctctgcgcccagcacggacgcgggtggttgcccgtggcgtcctctgcccctggcagcggaaaccttttttggtgaggtgcaaagggccatggttcaaagtgacccctcaagaggcatctctggctggacgtgtgacccgcgtcgtttcgggcttttgctcctgtccctgagcagatcagtgacccgattcccactgggattcccacactaggggtctcctttatccttacatttctcacctgaggaggcttctgagtgccggtccacaagggtctggccgggtcaccaagctggctctgaggaaggtgcctggggcagaagttgggggtggggaagtgcgaccccagggcagtcagagtcttttgcccggggaggagggcagctgtttgtggccaaaatgcagcccccgcctggcccccggcccctccgcttggcccctggagcagcccggtgggcaacacggggacccagcagggagggactggggtgtggggctggtgtaaactttattgcgagggagggcggcggggtcggggaggagcagcgcccttgccagggatgaaacccggggttggggcttggaggggcggccctgggcctgggaggcggcgctcagcctgggctgcagcctcgcggagggcggggaaggagggatgcggaggagggaggagggaggagggacgcggacggagggagggagggaggggagcgcggggagggagggagggagggaggcgagcgcggggaaagccggcgggactagggaactagcgggactggcagccgggactgagcgctccacaggcgccttctctccagcgccgcgtcccgtcccccccggcatgaccgacgtcctgccccagcccgactgcagcccgaaggcggggcgcgaacccctggcgctggaggagtcggggagcaagcgcccccccaacaccggcgcccggctctggggccgcgtgcgcaacaagctgctccgaaacaaggtgcccgcgggggctggaggttccggggggtgggggctcgggggcgctgcggggctcggggggctgcgggggctgcgggggctgatggggtcccgctcccgccccctccgtggagtcccgggacagagctggggtctgtgcgcgtccctctaagtggcttgaacttgatggcgaacgctggggccgcccccacccggaccctggcgctcgggcatctgcccctgcctcgggagaagggaggtttcttctcggcaggtggaccctgctttccactccgggagtgcaaacagcgcacggggagacgcctgcctctgggtctatgtcttgccgccctgttcagcctctacctgatccctgcatccagcgggccttgctggctgcccctttgctgaggggcgccgaccgcagcaccgtctgccgtgtgaggtttctctgtgcaggattgtggggaggggagatgctgccgggtctgggggctcgaggcttcccttcagggaccacccatctgactgtgggcccagtgcccgccgggcaccaggcgttccgtccatgtgccagggcagaccgccggtgcccctgcagccccagacctgagttgggattaaaatctgagatagaagccgactgtcctgcagctgggcaggctgcctcggggctggcttggggccctggcatcaggcacgtgaggaagagccagacccagcgcccagcgcacaggaagtgctcgataactctgcagatcaaatcaactgtccgagttagctgtctcagagtgccagtccggctggccagggctgggcccatccatcaagagagcaacaagggaggccttggccagtccgtggtggggatctgcagctcctcctgaggctcacaggacctctctgcaggctcttactgccagccggcattgaggctcctggcatcagccaggacgaagtgatcttgggctcactggcccctcgttttgtttcagctcctgccatggggcatacttgacctcccagaggtgacatcagccctggaaagtgctgggcagggcagcaacttgagctgtactgcactggcccctgtgtcaccttcagcctccctggggactgggctagcagagccctgctggccccagctgctgccagagcccctctgtgctgaggcagctgtctgtgcccggcagcgtggactcatcccctccccagcccctgctgaggccagcaggcaccagcccagagctcaccatccatccccaaacgtcagggttggcaagaaactgacctggcaggttccgggtccagcgccagccaaacagggcgcttccagtttacctgcccctttgaggaggtgcctggtgggcagggggcaacttttaaacctgaggtcccagactttcagttctttccctatgcatttgtggccggcagaactgagaagccccttcaagaattccttagctgggtttgcctctggcagtgcctggtggctccgtgtctgatggggatctctgggcaggggtggtggccaggcagacgccgggctattgagctgctgagcagttggcgtcagtgcagctcagggtggccccggccctgggctgctctgtgtgacgagcgattccatcccctaacgtgtgctgtgtgccacagtgtgtccgtgtcgtggacgcaggggtcagcgctgtggcggacggagggacgtctgccacagtgtgtccgtgtcgtggacgcaggggtcagcgctgtggtggacggagggacgtctgccacagtgtgtccgtgtcgtggacacgggtcagcgctgtggtggacggagggacgtctgccctgtgcttcccacctcactgtgcgcaggccagcgggtgagcagcagagtcaaagggccaggcctcttgctttctatcctcagccacattaacctggcattttcctgcaggagcttcacagttgggccgaggggctgggactaggcagtttcgtttcggtggggtaagggaagggtgcctggtactgcccagactggcaggagggattgcctcattaactcctcgttaactttgccctgagtgatgctgtgggtgcgagaaacaccggtggccctcctgcttccactgacctgaaggttcattaaaggctggaggcggggcgtgactcatccagggctgggattaaacaatctgttcagatggaaaggtctcatgatcagaactgagcctttaaatagtgcagggcctctggtttctgggggagaggaggcagggacactcacggaggatcctttgggtaccagcgggggtccctgtggttgggctgttcttgtcaccggaggagagttcaggggccaaagcctcattccagcccctgacttggcagtcagctttttgtgcgagtgtttagctgggagacacgtggcatctgggtttgtgggttcagccagggctctcggtattgaacttcgcgtttctacttttctttccttttccctgtttgtttttttttttttttgcctcaaatcacactcaagtagaccaggcccggtgccttcctctccctcccatccttccctcttctagattcttggttgagctttggatgggaaggggctgaattctagattctcgcttgagctttggaggggaaggggctgaaggaggaacccccccaccctgcccccgcagcatccccttgtgggagccgtgaggaggctaagagggcctgaagggaggccggtccagaagcatttgtctgtcggggaagttgaggcccttatagagcaaccaagtccaagacgctcctgacccagaccaggccagatgctggccggcggtggggactcaggctgagccggcagggtgtaaggagattgagtgcagcttcaggtgaccttgtctctgccctgaagcacagccatgtgggtctgagaatcccctacttccaaagagctcctcttaagctggacaccggcactgctgacccccacggtgagtcccgtgttctgtgatgggagctgctgcctttgcttcagagaggatcagaggtgttacctgaggaagggcggggtggagagcccctcttgggccattcggggaagcttcaggctcatgatggtcttagaagaaggtccctttcttggatcacctgatgtcaggagtccaagaccagcctggccaacatggagaagccccgtctcaactaacaatgcaaaaattagccaagtgtggtggctcacgcctgtcatcccagcactttgggaggcagaggcgggtggatcacctgaggtcaggcgttcgagaccagcctggccaacatggtgaaaccccgtgtctactaaaaatacaaaaaaaaaaaaaatagccgggcatggtggcgggcacctgtaatcccagctgctagggaggctgaggcaggagcatcgcttgaacctgggaggtggaggttgcagtgagccgagatcatgccactgcactccagcctgggcaacagagcgagactcggtcttggggtggggggaggaaagggtccctttctttgtcagcttgatcgccaccgcaggacaaccccacccctcacagagcctgtcgtttattccttcttgatggtaccaggtgtgcagaccacgtgcacaccccagaggttcactctaccactcacttggccatcgagggtacacaggtgctgggtacaagatacagatatgtcttgggctcgtctactttattttataatccagtctgggcgtcaggaaagatctcgcagccttctgcaatagaagtctggcctggcccggctgcccaccgcccttccttgtttcccggtgggaagaaagcttcatcgtgcgtcttctctgttcacacacacccccatagcgacccctcagccacagacaggggactacagtgctgcctcccccgagagctggaggcccctacaccagcccacctcttcctgggcctatgtgtgggtcctgactgcggccaggctggctgacaggttggcagtggggtcgggcgaccctccctcttttccacagcacttacccacctgccgagtgggcagacctcactgctggggcctcatgagtactctctgatctctctgccaggccagctcccaagaggcttgcttgagtccgcagagcgggaaccctggactctgagaatctgatgaaggttctggaggccactcagacacagagccaccccatgcacacactgtgtgcgacttcagagggggctgcagacatcaaggcgggaaccctgctctgagtgaacttggcaaggtgccgcttcttggtacctagggagggtagaagggcgctggtcctccccggcctccctgcaggccacagacggcttggccagccagcggtgctgggcgcggtgccccagcttttggatggctctggaccagggagaggagaacctgccaatcaagggggttcctcaaaggccaaagctgcctgagcccagtgttgctgtagtacccagaggcaatgaggccccagacattttggaaggagcccccaagcctgcaggtgtggctgggggagctgccccaggcattttggaaggagcccccaagcctgcaggtgtgagtctgggggagctgccccaggcattttggaaggagcccccaagcctgcaggtgtgagtctgggggagctgccccaggcattttggaagcgcccccaagcctgcaggtgtgagtctgggggagctgccaggtgttggccacagggcgctggtgctggagaggcctggccctctgctgagtggcctcgctcactgcccaggtggttgggaactggtcagcaggtgctgttctttgacctcgtttcccctgtgaactcatgctggggcaggaagatgtttgtgtcctgacggccccccagcaccttcgaggaacagacagtcccctgcgcctgtgacctgcctgccccaccctggggagaaacgcagcgtcagtcctgggtccagtgagccgtagacccttggccctccaggatgggccctggagaggcgggaggggcccgtggagctggtcctgggcttctgtagagaggccaggaggccccaggatccccacagagacttccccagtcccgcttcaagacagcggaaccagctcctgagccgaaatctggagggatctcctttctggaccgtgaccccagccggggctggtaccgatgaccggcacagccagagccgtgacatccacagcgcccttcccatccgatgcctggatgccgtggctgtgctcggggaggcctccggggtccccagcccctcaggctcatgtggcacaaggtgccagagaagacagggcgccaggccggtgggagtcaaggtttcccatttttctcgtctcagtctgctacttaactgctgtgtgcccgcgagtacatccctttgcctctctggttctctggtatcagctcaatgaaggagctgaacaggatgatctcctggaatccagttcatgtgatgatcttggccatgtctcaagattcctagtcctaaaccttaaaccctgagcaccctgggagagtctgtcacagggctgcacctgggccaatgccagccattcagtggacacgggagcagggggtttagtgggaacacagggcttcttgagccctgtcctgaagcagccccggcggggagccattgtcacctccttcccccatgccccagttggttcctctggcctgtgagtattgccggagcaccttccacgtgccaggcctgcaggaactagggacacagaggcgcccgagacagacgagaccctgtctgcaggaggagtccgtcaacaaatgagatccttgccggtcagatgagtgctgtgaaaaaaataaacacaactgggtaacgcagtagagagtgacggggggatgcctggcttgagaggatcacttttgaacgaagatttaaatgacaagaagaattcagccataaaaaacctgggggcagtgcattccaggccaaagaaccggcaaggtccacaccccgaggcaggtgtgctcagaggcagagggggacagtgtggggcgttacgtggggtcaggggacggcggccaggcgacgtggggccctgcggttcaggacagggcctttaatccgaatgcagtgggaagccgcggggtgttcaagcacagttctgtgacgatatgttttgaacacgtactgtacgaggcatcattcttagcctgtgacgcaactgaggtgacacttacaaggtgctgttattcacactgtttatttatttatttgtttgggttcttttgtttttgtttgctgttgttgttttgagacagagtcttgctgtgtcgcccaggctggagtgcaatggcgcgatctcggctcgctgcagcctccgcctcccgggttcaagcgattctcctgcctcagcctcctgagtagctgggattacaggtgcccgccaccacgcccggccaagttttgtatttttttttttttttttttgagacggagtctcgctgtcgcccaggctggagtgcagtggcgcaatcttggctcactgcaggctccgccccctggggttcacgccattctcctgcctcagcctcccgagtagctgggactacaggcgcccgccacctcgcccagctaattttttgtatttttagtagagacggggtttcaccgtgttagccaggctggtcttgaactcctgacctcaggtgatccacccgcctcagcttcccaaagtgctgagattacaggcgtgagtcactgcgccaggcctaaatgtgttttgaattttgttttacatttttaattttttttttttttttttttgtgggagtctcactctctcgcccaggctggagtgcagtggcaccatctcggctcactgcagcctccatctcccaggctcaagcaatcctcccacctcagcctcccaagtagctgggtctacaggcatgtaccaacatgcctggctaatttttgtattttttgtaaagacgaggtttcgttatgttgcgcaggctgatgttgaacttctggcttcagtggatccacctgcctccgcctcccacagtgctggattacaggcgggagcccccgtgcctggcccagactgtttttatatatgaggaatgaggctcagagagtgactcagatgaagtcacgtgagtggcttagccgaggggcgacgttcagaccccggccactcagcctcagcgcaggctctcacccgcggtgtcctgccttccgtggccggttggggttgggctgcgtgccccagatgggagcgtctggagacgccgggctcctgcccgtcaggcatcagtgtggtgcccgtcctggcacgctgtgcatagcaacaggcaagacggttcttctcgacgacgccactgaacgtgagactcggagcaaggcaaggcctgggaggggccgctcagagctgacctgggccctggaattgctggagcccctcacgtccccggcagcaagctccatgcccagaaagtgttctgggcccgggcagggagggtgaagctggtatcagagaaggctgttgatgctgctttttttttttttttttttttttttgagatggagtctcgctctgtcgcccaggctggagtacaatggcacaatctcggctcaccgcaacctccgcctcctgggttcaagcggttctcctgcctcagccccctgagtagctgggtttacaggcatgtgccaccacgccggggtaatttttgtatttttagtagagacagggtttctccatgttggccaggctggtctcgaactcctgacctcaggtgatcctcccacctaggcctcccacagtgctgggattacaggtgtgaaccaccgcgcccagccctgttaatgtttcttaaccactccaggtccagctcgaggcttcagagcccatggaggtctgacaggtccttggccttcccgtggcctccagcgtgaagcttcctggtcaggaccacagaaggcctctcatcttggactttgacctctgagggcgcccctttcctttcaggacagggcctccgtgttgctttggccctggcctgttccttttctcaagagggccccactgcccctgcccttgccactctggcatcctcgacctgccctgggctggggcagggccggcttcctggctggtatttgtagcccagttctgagctgaagctgaagcctccaggctgcctgcacagggaggcagtggtggggtgggctggccctgaggaagacggagccctaggccgctgggggagatgtgcctggctgtggggcctccaagagcagcccaggtttggattttgtctgcttctcctcaaggtcagccatgcccagcccgggggctaaaagcaaagtgggtgccagggcaggcagaggctctggagtggacgtggggccggcagaggcgctggagtggacgtggggccggcagaggcgctggagtggacgtggggccggcagaggcgctgtagtggacgtggggccggcagaggctctgcagtggacgtggggccggcagaggcgctggagcggacgtggggcaggcagaggctctgcagtggacgtggggccggcagaggctctggagcggacgtggggcaggcagaggtgctagaatggacgctggggaaggcaggttgctgcgggtgctaagaggctagcctgccttggacaaaagcgtcgttcagagctgctaatccccttcctcccatgaggcttggggaacttcgaagttctctggtgttggaggggaagccagccgaggccctgggacacggcatcagcccgagcctatctgtggctggcctgggtatggcaggtgggcacaccttggctgcaggacaccttggctacaagggagcctggctgaccctgcagggtgagggctggagaggcggagcctgcctggcctagcagtgtggatgccaagccatgggaagatgtgtggagagtttatggagcctggcccggtgtccccaacccagctgctgagctggaagccaggggtaggtcctggcagcccctccctctctgccctgcctctctcggagtcgctcggagcagtcacgttgacggaatcctccggcgcctcctcgagggaggagaggcagggtcttggcaactcccgtctcccccgttgccagcttgccagccccgccgtgcctctcacgcctgtggtctgccccaatgacaggccggcttcggtgtcccaaggggacccagccctgagcgtggggctgcccttgggggagggcaggggaaagccagcccgggctgccaccgtggccgctggcctgggagccccaggaaacgtgcccaccctcagacccgatgcctggctcagggcctgggctccgcggcccctccagggcaggcgtgaaatgtgcccacacagctccaccttccacgtggttccctgtccgggggccacttgcactgaggtccttctggagtcattttctgtttttttttttttttttttgagacagagtcttgctctgttgcccaggctggagtgcagtggtgctatcttggctcactgcaacccctgcctcccgggttcaagtgatttccggctaattttgtatttttagtagagatggggtttcgtcaggttggccaggctggtctcgaactcctgagctcgagtgatccgcccgcctctgcctcccagagtgctgggattacaggcatgagccaccgcgcccggctgggagtcattttctagcgttcctgtcccacctctcaggaacagatttaccacctttgttgtgaagaagcattttttttttttttctgccgccaggctggagtgcagtggcacaatctcaactccggctcactgcaacctccgcctcccgggttcaagcgattctcctgcctcagcctccccagtagctgggattacaggcacccgccaccacgcctggctaatttttgtatttttagtagagacggggtttcgccacgttggtcaggttggtctcgatctcctgaccttgtgatccgcccgcctcggcctcccaaagtgctgggatgacaggcgtgagccaccgcacctggctgaagaagcacttttttttatgaacctctgcaaccccctctgagggaaaccctcccgcattctgggatgccggggctcagagggtggagggtagaagagcgccagccgtgagaggcaggatggggcggcccccgagggcagggctgtgcctggaggcagggctcctcggggggtcagctcctgggcggtgggagtgaccgagtgggctcctgagggaagcggctttcaggaaggaggcggaggcctgggagctcttggggccctggcaaatgtggtcttcagattcccgtcgtccagtgagcccctggatcacgtcctgagtggcgtccactgaaggctgcttgggacctctgctcccccctccactgagacccccagtggccagttctaagtcccacctgccttgggcagggccaccacaggccccttactgtggattaaagggccctgggtgagggcttgtgggaggggaggtggtggaaaccatctccgaagaccttggggcgagctgcgtgctggagtggagagtgtggcccagcaggcaggagcactgggttggaatgggggctctgccacctccgagggagcaggagtggagaccggagggagcgtgcccctgaatccgagcacggggagctggccgggagcagccctccgggcagaggcaggagaaatggggtcacctgccccagggggtgagaggtgagccgagaggaagggctgagaccctcaggggcatccccaggatgttcctgaaactcagccctggaggacgctcaggtgtgcgtggagcaccctctgccctggagcctcaaatcctctccccgctgcggggccactttgctgattcctgccccaaacatgaggtcacttcggtccagaaaggcgaggcgacctccaccagccacctacgggattcttggcagagaatccacgctcaccttcgggtcttcactcctgctccctcggaggtgacggagccccatttcaacccggtgcccctgcctgctgggttttcgccgcaggggacctggtcgtctcctggacatgagcccccagcgccagcgtttctctttgggagaggcctgaatgcgcagtcatgatttgaccaggcgaagtgcccagacaaagagaaaacagtcggccggatgcaggggctcacgcctggaatcccagcactttgggaggccgaggcgggtggatcacctgaggtcaggagttggagaccagcctggccaacacggtgaaaccccgtctctactaaaaatacaaaaattagccgggcgtggtggctcgtgcctgtagccccagctactcgggaggctgaggcaggagaatcgctcgaacccgaaggtggaggttgcagtgagctgagatcgcgccactgcactccagcctgggcgacagagtgcgactccgtctcaaaaaaaaaaaagaaggaaatagttgagctgctctcagtgaccatgtacggcccagtcgtcgacccctggcccagtcgttcgtccgccttttggctccacgatgttttgcagcctgtttctgtctcctgcctgtggcccaccttggggaggccccagtgctcgtgtgcccctggtggtcttcccagcctgacccttcacgagctccctctgtctccctgcttcaggtgatcagacatcccccaagtacctgctcccctgggcccatggaaggcacctgtctgctgggaccagagggtgagcagtcaggtgtcccatccaccaacgtcccaggggccagcccctccaccccggtgctaatctcatcaggaaatagcacagtccacatttcccaggagttataaatagccagcgcagttgcgggcagcagcgtttctctggaaaatgtacgctgtgcctctccctccctcctctgtgtttaaatgatatcctgaaatagacttggtttctggaggctgatagcctcctgggaaacagagcgtcgttgtcagggcaccgtggggccaggcaggcctctctgagcggataccagggccacacctgcagcaggcaccagggccacacctgcagcagataccagggccacacctgcagcaggcaccaggaagatgtcagggcttgaggggcttacagcttaggaaagtgcccctggcccaggcctggcctcagaaggggctggagtgtgtgagacagcagcaagtgtcgcctgggaggctgcagagggtagatcttagtggagcaggaaggcagagaggacccaaagtttcccactgtgacctggggctctccgagaaggctctctggaggaggcggggcgagaactgggccttagcatcaggaggtgcagtcctgggtcagatgtgcccaggttgaacctggcagctggagcggaagtgatgggcacgaggcagcgggagggctgtactgggggtggcctcccagcaccaggtctgcccaccgggtcgggacacacaccaggaggcccgatgttgcctttctgaggaagcagcagttacagcagctgcgggtcatggacttcacacattctgcagtttcagcagagagggtgctgggggccttgattttgaaccccagctctgacttcctaggtgtgcactgggtaaattcctcactctcgttaagctgcagcatcctcatctgtgagatgggagcggctatgagagcttaaaccgcatatgtctgctatcatgatcatgaacgcagatgctgtgtgtagaggattcatcagtgtcagacttgcaggaagagctcgagataagtccgttgctctcactcttccataacagccctgtgagtcaggtgtggatgcctccatgaggaaattgaagttcacggaggtgaaaggccttgcccgagtgcgcacggttgaatgggagactcagatcagcctgcctccaaatcctgcacactccccccgaccaggttgtgtccaggtccccctgagacttgggaagggaccattggctcagcttcctgcagaagctgccaggaggcacccagtcgtgggaagctggggcggaggaggggctgtgggtgaatcggaccaggggccatggaattggcctgaggcttatgctgatgtgtggagagacctgcctcaagaaggggtggtctcaaaacatcgaactgcgccccataaatacatacaactgcaatgtgtcaattaaaaaataagggcccgggccaggcgtggtggctcacgcccgtaatcccagcactttgggaggccgaggtgggcgaatcacgaggtcaggagatcaagaccatcctggctaacacggtgaaaccccgtctctactaaaaatacaaaaaattagccgggggtggtggcgggcgcctgtagtcccagctactcaggaggctgaggcaggagaatggcgtgaacccgggaggcggagcttgcagtgagccaggatcgcgccacagcactccagcctgggcgacagagcaagactccgtctcaaaaataaataaataaataaaaaataagggcccacacagtggtacatgcctgtaatgccagctcttcaggaggctgaggcaggaggatcactgaagcccagggcaacatagcagcctggacggcacagtgagaccctgtctctagaaaaataaatacaggccgagtgcggtggctcacgcctgtcatcccagcactttgggaggccaaggtgggcggaccacctgaggtctggagttcaagaccagcctgggcaacatggtgaaaccccatctctactaaaaataaaaaaattggccaggcatggtggctcacacttgtaatcccagcactttgggaggccaaggtgggtgggtcatttgaggtcaggagttcgagaccagcctggccaacatggtgaaaccctgtctctactaaaaatacaaaaattagccgggtgtgatggtgcgcacctgtagtcccagctaattgggaggctgaggcagaagaatcggttgaacctgggagacgggttgcagtcagccgagatcacaccactgcactccagcctgggcaacaagagtgaaactctgtctcaaaaaaaaaaaaaaaaaaaaaagagggcatggccgctccagaatgtttcttccaagggtagcatctcagttgacaaagagcatttgattcctccaccctgtgtggctactgctgggggacagagctggggacagacccaggcccggctccgtgtccagacgagatgaaggaactacgagggacagcctgtgtgatccaggagggtttgcaaagaacagaagcagcttagaggggagagaggtttcgggaaagtaaggccagagctggggcttcctttgagaccctgtaggacccctgcctccagccgggctggtgatggcctcacgcttcccgtgtgtgaagaggtgcccggagcagtggttctccctgaggggcacttggttctctgcacacacccaacttctgtctcctgttctgggttccatcccttctctgggcagggcgaacccagtgcagacccagaccccgtcggaggcttgggtaccacctgcccccagccggtgtgtgggtgatagatgtgggaaggacctacatcgagctgcaggaagcccaaggctgacccagatccagtttcccttccgtgatgacagtggcctgttatagcaactgcgttcaaaccgtggcacgcacacctcagagtgcacagagacgttctgagggcgacgtgggcaggagagttttcaggaaatcagtttgcagattctcagctgccataggtgctattgccagaaagccatctgcctgagagccagcatctcgccatcctgtcctctgcagaggagaggcctgaggctggctgtcggggcttggcccggggtgcgcagacctcctgggtggggaacagaggggcttttagaaatgttggggtaggggccaggcatggtgggtcacacctgtaatcccagcactttgggaggccgaggcaggtggatcgcctgaggtcaggagctcgagaccagcctggccaacatggtgaaaccccatctccactacaaataaaaaattagctgggcgtggtggcaggcacctgtaatcccagctactcgggaggctgaggcaggagaatcacttgaacccgggaggtggagcttgcagtgagccgagactgcaccactgcactccagcctgggcgacagagcgagactccgtctcaaaaaaaaaaaaaaaaagaaacgttggggtcagtgttcagaaagtaaaagactctagtggccacttagaacctttcaaaagtcaggtggtatccagttctttgccttccacaaaactgatggaggactcaattttcaactgagagatcatttcaagtaattttcagtaataggtatatatgcgatttaaggcggatagcatggagagaggttaaagaatggtgtaacgcggctgtgataaaactcttttcgacctcatctacttctttatgtgaacaaaatgtttcattgttcacatatttcttgttcattttagagacatggtcctacattgcccaggctggtctcgaactcctgggctcaagtggtcctgtggctgggagccacagcacctgcacatctttacaacaaaaccagaaacatgaaccaaattgatgctgagcctcgtttcactctagcaaaaaataataccctatagatacgcgaactaaagcaaaaaatgttccgcccatctcattgagagagcattccaccaaaaagttactctgctacttaatatttattaaaatgtataatgaggccaggcgcggtggctcacgcctgtaatcccagcactttgggagaccgaggcgggtggatcacctgaggtcgggagttcgagatcagcctgaccaacatggagaaaccccatctctactaaaaatacaaaaaattagccgggtgtggttgtgtgtgtctgtaattccagctactcgggaggctgaggcaggagaatcgcttgaacccaggaggcggaggttgctgtgagccaagatcgcaccattgcactccggcctggacaataagagcgaaactctgtctcaaaaaaataaataaaatgtatataatgtgtcggcttactttttttttttttttcttgagacagggtctcactctgtcgccaggctggagtgcagtggtgtgatcttggctcaatgcaacctccacctcctgggttcaagcgattcttccatctcagcctcccaagtagtagcttggactacagtgcccgccaccacacccggctcacttttgtatttttagtagagacagggttttgtcatgttggccaggctggtctcgaattcctgacctcaggtgatccaccagcctcagcctcccaaagtgctgggattacaggcgtgagccaccgtgcctggctgtctttttaattatgtactgccaatcatggtactaactaatcctgaatatattttgaatatttggagccttgtggtctctggaaatttttgttttcaatgtatacagattttttttgtggaagcaaaatgtaatggtgaataaaggacttgaaaatataaaaatataaactaggacaacattctttaggagaaatggaatagaaacaaattcaaggagagaagatccaggagctctgtgagggaaagaagagcttgtttgtgtagttttttgttgttgttgttttttttgagacggagtctcactctgtcgcccaggctggagtgcagtggtgtgatctccgctcactgcaacctccacctactgggttcatgccattctcctgcctcagcctccccagcagctgggactacaggcgcccaccaccgcgcccggctaattttttgtatttttttttttttagtagagacggggtttcaccgtgttagccaggatggtctcgatctcctgacctcgtgatccgcctccctcggcctcccaaagtgctgggattacaggcatgagccaccgtgcctggcctgttttcttaatattgaattttgagagttttatataataagccctgaaattgggtaatattagccctatagctgtgttctttttcaacattgtttagatgttttttctttttttttgagacggagtctcgctctgtcgcccaggctggagtgcagtggcgcgatctcggctcactgcaagctctgcctcccgggttcacgctattctcctgcctcagcctcccaagtagctgggactacaggcgcccgccaccacgcccggctaattttttgtatttttagtagagacggggtttcaccgtgttagccaggatggtctcgatctcctgagctcgtgatctgcctgccttggcctctcaaagtgctgggattacaggcgtgagccgccacgcctggcctcgtgtagtttttaaatggatgagtgtgggtatcacgtcgctggggtatttagatcccactgaatccatgagaaggaatgatgtcacacttttattttaggatggcaatattgacatgattttggaaatcatactctttgcaactatttaaacttggaaatgttcagattttgacttcagaaagtgccagggagcgcacagttgctcagaattagttcgcaggtgcacaggcagacgggcgcgaaggcccccgagttacagaaacagaacgtggaacagtcctgtgtgagggttgcctctgacctcccctggggtccgcacctccctgggctccagcccgagcctggggacttcccctgtggaggatttgcttatttgggagccaatggcttgacccaagttttctccctgaatcttcccagcaatcccagggaggcaggttctgttgcagatggaataactgaggcttagtgagtttaaaacttgccaggattcaaacccaggcagcctcctgtgcgcgggctcctgactcttcaacacctccacgtggatgggctggttccctcctgatggacttgagcgcctcctaatcaggtgcttaccttttgtgagcctcagtttctgcatctgtgaaatggggtaataatacccatgtcccgggctggcagccaggagtgcctaacagggtgtgccctgcctcccccacggtgggtaacagagtgtgccctgcctcccccacggcgggtaacagggtgtgccctgcctcccccacggcgggtaacagggtgtgccctgcctcccccacggcggccacaggggcctgggggctagggtccccccaaagggttgatttccaggtaaacatcagcttatcccagctgctcacttccgccttcctgactgtgtagctggctctgagcagtgctgacccacggggagatctctggcttggcctccgagctggcacctctctcacccacattctctctctgcagctggacccacaaaccgtggagaccaagaactggcacacggacgtgattgagatgaacggggtgagccggggatgggaatgatcagtggcgtgagccgggaggtggaacgtctgtgcagcaggtgggcagcccggccctgtggctgctcctggggccgctgtgccgcctcgacctccccgcagcccagccccctctcccctcctgcccacaccctgcccgctgctgtcctgcaggtgttgtgttgagggagacctgggtgtgagctagccctcatttgcagtcttggggaggggacccctgtgttttgggggcattcctcgggcactcacaccctggggaatctttacctgcctcaccccccaaccagatcaaagtggaattttccatgaaattcaccagccgagatatgagcctgaagaggaccccgtccaaaaagcagaccggcgtcttcggtgtgaagatcagcgtggtgacgaagtaggtgctgcctcgggtctcccagtcctggcgtcggtgccccgggtcccccccagcccgggccccccagccctccccgccggtgcccatcctggcacctaatcagttaccccccgctcggcggtggcagatggccggtgtggatctagagtggccgcagaggcgctcacaggacacttcagaagcacgcgagccagcacctaaacgctggaaggtctcttgtgagatcccagatcgtctgctcctcgtaacaagcgggaagctctgtcagccgggggcctacgtttgggctcggcaccaacggggactggcggcccctcgggaaagggcacgtgtcccccggttcaccaccaccctggccccttgtctcaggcctgacccacctcctcatgtgggctgcctgctgggcctcctacaagcatctgaatctgggggacgttctttccctagagtctcggccttaccttcccaagttcccaaggcttctcctgcccacgtccgtcgatgccccttcggcaggcctcgggtgggctggctggggtggggtgcggtggcctctttctctgccctgcccctgcccccgccccagctctccatcccaaatgctagaagctctccagggtgtgtgtgtgctgggtgggggttgctacgggagagctgtcgtgggggctgccctccacccatcctcacgctccaccccaggcgggagcgctccaaggtgccctacatcgtccggcagtgtgtggaggaggtggagaagaggggtatcgaggaggttggcatctacaggatatcgggcgtggccacggacatccaggcgctcaaggccgtcttcgatgccagtgagtctgggaggcccagccggggcaggtgtggctgtgtctgagcaggctggtgggatggacaggagagctcgggggaaccaggagcctccctggagaggaggcttgctctgcttcagagtccccgtggcaagtgctttctcttgtaatcccctcccctccaatctcttgtcccttgctgcaggtaagcaactgcagaaactcacaagggccgactcacttgcccaggatgacccaacttgtaggttttggttctggacttaaaactcagatctgactccagtgtctttcttgctagttcctgggtgcctggtgagccgcagggaaagagctttgagcctgcacctgctgtctccagggccccaggtcccctctggggcagtgctgcctctgcgtgaagcccaccatggtgaggcctgacctttctggtttctcctccctgctcctgctggttcaggtgcagcagccacataccccactgtcaagaaacctgcactggccaggcagggatgaatccgtggggagcctggagtggaggacggggtggggcctgggaactggccggcgttggtgcctctgtgcagcctagaagctgaggctttgtcggaacatgcttttacgtgtgaaaagtgtgcaatgccttccagagaggggcttagcgatggagaggttccagtcggaaggaagctgcaggccacatggtatgaatgtggctctgaactctgggtgatggatttcactccccaaacaccctttcccaagcagccacagcagatggcccccaggctatctctccctgttcccccaaccccgacccacagagccgagtcacagacacctgtgggccctctctacatcctgctcttccaggggagaccagaaccagagctggagtgggtgggggctgtgtcaggatgggtcgggggtggaacggggctgctggcccagctaaggctgcctgacctcggccccacccctgcagataacaaggacatcctgctgatgctgagtgacatggacatcaacgccatcgccgggacgctcaagctgtacttccgggaactgcccgagccgctcctcacggaccgactctacccagccttcatggagggcatcggtgaggccctgagggctcctaggactgggctgggccagactgagccaggactccctgcccggagaagtaaccagcaggagaaatatctgtggcttcctttgctggctgaccttcccagtgcactggggcctgtggctgaggggtccgagggtgaggtgtggcctgctgggacctggtgcagacactgggccctttctcgcctgcctcttgcccctgatgtccccatgggcagccccttctgcttcctatttggacgttggcctcttgcttggaagctcgagcatccagggaagactgccctgaggtgagtggccagaagccagcatcccagaaccaaggaggaggctggcttaagccatagggcactcgagatgggttgtgctgagccttccagcgggaccacacaccgtcccgtcacctctgcggagggccccggccagcaggccttccgcctccacccacctgggccaaacccagccccaaggaatcccttcagccttctctgctcctggggcagactggagcttcagcccccacggaaggctgcttgcacccacgctccagcagcagaaggggtggagaaagagaatccaccgctggcaggatatgtccctactggcttaaccttagccacacagaccagggggtgtcctgttacgagacaggggatgccccagcacccaaggcctatgcagtcagctgcaggaagggggtctgctcccaccagccggcctcctggctgagttaccagtcgtggtggggcctcctggaggaagcagctgctgacagcccacccagacaccaggccctcccctgtggggtctgctccccaaaggcctggaagcctgggctctctcccgcaggggcccacagcctcacgaccacaggggccctggcggggagccccaggagccaaacgccacactggcccttctctcccacagccctgtcagaccctgctgccaaggaaaactgcatgatgcacctgctccgctccctgcccgaccccaacctcatcaccttcctcttcctgctggaacacttgaaaaggtaacggggagcggccccaaccccacctcctcagtccctcctcatgaaaaggtaacggggaggggccccaaccccacctcctcagtccctcctcgtgaaaaggtaacggggagtggccccaaccccacctcctcagtccctcctcgtgggcgctggcctccatcgggctgtctgtggggagtgagagtttgctttccaagttcttgcactcatgtttttctgttttgagaaatatttgggtcccgtaaccagtagtaacctcaaatattgaccatagaatgctcagaatggcagggtgagagcccaggactacaggcaggttttataatcagtgggtcccaacctactggtggttcattcaacgaatgtagccatttctagatgcagtggggggtggacagcagtggggggtggacagcagtggggggtggacagcagtggggaatggacagtagtggggatggacagcagtgggggaatggacagcagtggggatggacagcagtgggggacagacagcaggaggatacattgtaagccttgatgcaggtgctgcttttcagttacatagagacgtgtggactgtgttacagcatgggttgtattgtgggccacagtcaaaaaaggtgaaacccactggtcttggcccacacctcactagacatagggaaactgagtccccacaccaggcggagacttgcttgggttagtagcagacctgtccttagagccctcaacttccagatcctaaattcagacccttcttgccttcccaccaccctttctagtcaggtccaaccaagagtggctaaagttggttgtacttgtagcaaagttcagaggtcctcaggcttgcgtggggaggtggtccctgggcgtcccttaaacccacctgcacgccaggaccggggagccccctcagactgctctgcggaacaattcttccctgagctcagccccagctcagggccaggccccccgctgcagctcagccacgccaggctcgggagagccagtggagacctggacgcgcccggggctggtgtcttgtttttcccatcatgaaacatttttcctctggtttggccaggactagagccccaaccaattccgaaagcatttggcaagccttgtggggaggagtgggaagggaaaattcattcggcttccaccctgggaactgggcacagtctgttcccacatctgggcccctggctggaccgtgtgcgcgcgtgtggtgaggggctggccccgctgcacagctgcctgttggcatcacagtgtttgtttgcctgtttccaaagcaggcgcagccacagctcctgcctggagggtgggaatgatggtattgagggtgagaggcgctgcttagggtgggtgggtctcagcccagaaacattttttgagactgaaggagaaccagaggccctctgatatgtttgctgaccctgggcctgcctggacaccagccctgatggcagctcctgctgttaccccagggaagcatcgcagagcatctggcctgttgagtaagagaagcaggagaggatccagagggaggacaatcctgggtcccacgaggcagacggagaggcataggaggcagccctgggtcccatgaggcagacccttccggagaggcacaagaggaagccctgggtcccacgaggccgacctttccggacaggcacggggggacagtccccgggctcatctggaagtagggctgctcctgccccagcacagctggcagagccccgggtctagctagtgactcctgctgggctccaggccctgcctgcctttctcccctgccccacccaccttaactcttcttttgggccacttagcacatgagaaagcaacagagcggtaggtcctggaggcagctaccggggttcaaatcccagctctaccagttgctggctgtgtgaccttgggcaagtcacttaacccctctgtacttcggtttcttcatctacacgatgggggtgacgataatcatatttacctcaaaggactgcggcgagtgtgagttgttccagggagttttcagaacagtatctgctctcaggcaagggagctggagttggcatctgtgggctccctggctctggcagttcaccatcagttcagggggacccagcagctggagatgttagcacagaacactggcacatggctggggccctgctctcctggatgagtccccttcccccgggggaggtccccactcctaggagacagagacgaggtgaccccttccaggagtccttcaggagttcccacagcgaaggccaagggtcctggagctccgagtggctgctgaggaagggcttctttcctccccatcttctccttcttagggttgccgagaaggagcccatcaacaaaatgtcacttcacaacctggctaccgtgtttggacccacgttactgagaccctcagaagtggagagcaaagcacacctcacctcggctgcggacatctggtcccatgacgtcatggcgcaggtaccctggcaccgcccgggcccgtggctggcggagggtgacggtcccatgacgtcatggcgcaggtaccctggcaccgcccgggcccgtggctggcggagggtgacggtcccatgacgtcatggcgcaggtaccctggcaccgcccgggcccgtggctggcggagggtgacggtcccatgacgtcatggcgtaggtaccctggcaccgcccgggcccgtggctggcggagggtgacggtcccatgacgtcatggcgcaggtaccctggcaccgcccgggcccgtggctggcggagggtgacggtcccatgacgtcatggcgcaggtaccctggcaccgcccgggcccgtggctggcggagggtgacggtcccatgacgtcatggcgcaggtaccctggcaccgcccgggcccgtggctggcggagggtgagaccagccccttaggaggagagagaacagctcagagtccccacacctcttccctcgtgggaagctgggttgatgggctatggggtgtcaccagggaggcaggactgtagacacttctgcccctcccaggccaaaacaaacatgtgagcctagaccagggcccagagatgctggctgcattctcaggagggcctcagtctcagaaagcaagcccaggggtggggagatgctgggcccttgtcctcatgggtggaagctctgaggttgcttccaagggcgggaggcttccctgggattcctgcaagacccagagcaggggccggactgtggccgcctcaggacagagcagaagcttatggccaggttggggaagtggccctaggcccccgaccctctgccccgtagcaccttccacggctgcagaaaggcaaacacacctgggctccccaggaaggggcggtggccggagccagtctagggagtgggaggggcaacacaggctggagtcagcaaggacgaggcctaggacagggagcccagcctccgccttcctgtctccccacaggtccaggtcctcctctactacctgcagcacccccccatttccttcgcagaactcaagcggaacacactgtacttctccaccgacgtgtag

SEQ ID NO: 15342 - DNA, 183796 bp, Homo sapiens
ggactgcagagggaacttgccttgaagaggcctggtccttaaagagacacagcacacacggcccgaccggcagccccagagcagaggctccactgatggcaggcgcccctggctaggctctgaggttcctttgccctcgccttgctgaatggtgagccgctgcctctcggagcccgtctccttgacagcctgccctcggctcctgcagccactcctgggcctgatggggacagggccagcctggtgggtggtgtcagaggtcctggcagagcagcgtaggcctgggatgcgtctgcagaattctggctgaacgagcgaggagcacggccagcttcggggccgtcgtgaccacaggagggcagagggccagcccgtgagctctgaccccagctggacgtgctcttgtttcccttggggctaaggagattggagccactgaactgaatctctgggttttggagacttagagaatccattggactcttctgctggcgtctttctgaatgctgatggggacttggtggtaagtaaatgagtagggggctccaggccctgctgtcgagccctcggacggaccctttgggaaaactctgctgttgacctgtgggtggtgtcatctgagccatgtcaggtgagggccacgtgagctggggcttggcgagagaccctcctaaaacggtggctcggggagtgcataatctaagccagcggctctgcccaggatgctgcccttgctgtggcccctggccatgggaacggggcttcaactcggcccctgggaagtgtgtgggggcgtgtggggagtgtcacagctgcaaggacctgatgtcactgtgctttatcctgcagtgatgcctagggaggcagtgagggggtgaatgcagctccccggggagcaggtccacatcttgccagggcagcaggtcttcccatgactcaagctgacacaaaagtttggtgcagaaatgactaactgggaagggcttccagttcacctctgttgcctgtagatctcactggctgctggaaaagccgggaggctgagcagagggcaggtgagaagagggcaaaagacagactcataggctgagacttcacccttacaggtgacactgtggaggcctggggaattttcttctttccccagactggagggctgaggatgaatcttagaatagtaaatgctggccgcacatggtggctcacgcctgtaatcccagcactttgggaggtggaggcgggcggatcacctgaggttgggagttcgagaccagcctggccaacatggcgaaaccccatttctactaaaaatacaaaaaattggccaggtgtggtggcgggctcctgtaatcctagctactcgggaggctgaggcaggagaatcgcttgaacccaggaggcagaggttgcagtgagccgagatcctgccactgcactccagccaggcaataagagtgaaactccatctcaaaagaaagaaaaaaaagaatagtaaatgctgctttactgtaccaaggaaatgggaatagagcaaagcacggaaaacaggccaccccaggatctgacaggagagtttgtattctgctagtgctcataggaggcctggaggtcgtcttcttgatccacctgggcacataccttcttttttttttttttttttttttttttatttctttctgagacggagtctcactctgtcacccaggctggagtgcagtggcacgatctcggctcactgcaacctccacctcccaggttcaagcgattctcctgcctcagtctcccgagtagctgggattacaggtgcccgccaccacgcccagctaatttttgtatttttagtagagacggggtttcaccatgttggccaggctggtctcgaactcctgacctcaggtgacccgctggcctcggcctcccaaagtgctgggattacaggcgtgagccactgtgcctggccctgggcgcatactgtctacagatgtgaacactgaggctggaaactcttgagattggccggaggcattgaagaagtggggtttggccgggactggcatttgggagattgtcactggactttgttcagcttgtctccagggtcatctggcctgctgtagtagatatggttttcttgggataccagttctctttctactttatcatcagtggccctgggagggttctgaaataacgctgcctgcctccctcgtgtagctccgatttcttcctccctgagtttaacttcattctgtttattcattcattcactaattgccgctcaatgcagagattacacacgggaaccctggattcagacttggttcatttccaagcatcgccatctgctagttagccaatggcttagcctctctgcacctcaatttcttcttctgtgaaatggagataatagtaaattggcttattgtaaggattacgtgaaataacctacgtaaagcagatagagcagtgcctgacacttaagaagcactcagtagaccaggcacggtggctcacatctataatcccagcactttgggagggtgaggcaggaggatcagcttgaacccaggagttcaaggctgcagtgagctgtgagaatgcccactgcactccagactgggtgacagagcaagactctgtctcaaaaaaaaaaaagcactcaataactgttagctgtcattaattttatttgttcaatgtgcattattgaatgccgatctgctgggcgctcggcagaaagctgatctggaggcaccatgtggtcatagctgtgctgggagtctacctgagccttgttcacccactgcgctgagcactgggtctgcccagtgaggaagatgcagtcctggtttttttattttttatttttgagacggagtcttgctctgtccccaggctggagtgcagtggcgtgatctcagctcactgcaagctccacctcccaggttcacaccattctctcgcctcagcctcccgagtagctgggactacaggcgcccgccaccatgcccagctaatgttttgtatatttagtagggacggggtttccccgtgttagccaggatcgtctcgatctcctgacttcgtgatccacccacctcggcctcccagagtactgggattacaggcgtgagcaactgtgcccggctctggcttttttttttttgagagggagtctcactctgttgcccaggctggagtgcagtgacaggatctcggctcactgctgggattacaggcacatgcaccacgcctggctaatttttgtgtttttagtagagacggggtttcaccatgctggccaggatggtctcgaactcccagactcaggctatctgcccatctcggcctcccaaagtgctgggattacaggcatgagccaccgcgcctggccagtcccagcttttaaggacctgatgggccagtgagggtgcaaactctcggttttttggtcatcacagtctatttttggttttggtttttcatttgaatgtagagggccccactccctcccacccactgtgtattcagcctctgcacgcaccggggctccctgcctggcccccgcatgggaacatatttttgtcatcagcggtgacctctgggtgatcaaggaagcagagactcctggggccttcctgtcgtgtgcagtggagctgagctgctaacatgagaagggaggaaatgtggagatacccagttttggttctagggcccgtccccttttttctgtcctggccaagaaccaaggcttctaccttgattggtagaagcaagagttggtcgttggagaggccgtgagtagcacgtgcttgggaattaggagcagggcaaatagccttgaaaatgggatgtaccttcttcccactcagcccctcgtcattaacccagtgctcctggcggtgcacccaaccatgaaatcccctttaagtccagtgatgaggcaggagcaggcaggtcaccctggggttggagagccgcagacagtctgagtgcacaggctggagggagggctgggagggtggagagcactggccccagggactgtctggggaatgcttagaaggggcctggaggaggcagcgtgatagatgggggttcagtgccttggggagcactggctggtccccacccggtccacatttagctgaatcaggaaggtctgtctgccacagctccccgctcctctgacagattggggttgatcgctggggttagagcacttcagggtagcatcacctttggcaaagcccggaggagaaggactctttaactccttccttcccagcgcgtgacgttggatctccccaactcctcagtgccagggatgcggaggtttctgttcccacccaaatcactgtggtgctcaaaggctcacacacttgtctctgtggccaaggttagcatctggccgtggtgttaacatctactggaagccatccaacaaaggcatcaagggaatctcgaagtgactgccctttcctgagacacgttgtctgagacagacgtctggagatggaagagggttgacagggtttcccagagggtggtctctaaccccatggacccgcagagatttctcaggaccttcagcacccggtgatcaccagttagctggccgtggaggcagtatgcgtggtgtttaagagcatgaacaggccgggcgcggtggctcacgcctgtaatcccagcactttgggaggccgaggcgggcggatcacgaggtcaggagatcaagatcatcctggctaacaaggtgaaaccccgtctctactaaaaatacaaaaattagccaggcgtggtggcacgtgcctgtagtcccagctactcgggaggctgaggcaagagaatggcgtgaacccgggaggcggagcttgcagtgagccgagattgtgccactgcactccagcctgggcgacagagcgagactctgtctcaaaaacaaacaaacaaacaaacagaaaaagagcatgaacagagtgccagggttcaagtcccagccctcacttaccctctgagtgggttactcagctgctcagggcctcggttttctgacctggaaaatggagaaaacagagataacagtgacattcacggtgagatcacgctagtgaacgaaacgctaagccgggcacacagtcggtgttctgtgttcgttatcagaagtttcctctgtagagccctcaagatttgtctctccctctaccctctatcgtgttgtggagtggagggtccgagagtgccaggattggacagaatgtagacagaaaaaagcaaactatggcaacgcgaaggaaagcaactgccacattttagcttggaggatgctgaaaatagcttgttcaagcctttgtagataaaaatgtaaaatgtacgcaaatgtatgtgactcacgcagaagcatacatccatagctccctcacagtcagcgccggatgtggccatcaggaaaaccccacagtgtggggagagggcccgagcgttcttgcttgttgttgttttgaggaggggacggtgctgctgcctcctgggctggtggctcctggtggcggcagctcacgcccgtttccacctttcccctgggctgtcttccgagagttccaggtgggaagaagagatgcccttggcccctcatggctcctccggcctcgcggtcctccgagagcctgctcgttcccttcccatgccgaagctctatttctggagcgtctcattggagatgcacgccccctccctgccaagctccaggtgcctgcttggccctcccaatcctgtgtgctagtcagggacggtgggagggtgacagctgcagggaggggcggcaagagacagcgctggtgcctgagccaggaggattggggcggagggagccctggggacgcagggacgggctaataatattgaaaaccacttctgctgcagccacctgtagaggcttccccacccagagcatcatcctgtgcgtctcccaggggctccccagcctgtgatgagtgggtgacccccatctcccctggggcagctgcagaggcctctgcccaagcagcttatggggcttcctctcagcatcctgggggaggagctgcttctccccttaagaactagatgtgtgtgtgtctgtttggagtgatgaggaccgacccccacacccctccagcgttctgcgggtgccgaccacactgcccccggcaaaggccaggctgacttaaccttcctggtaggcctctgtagggctgggctcccagaagttttccccttaagctgcctggggatggggtggggtggagacagctccggtatctgaaatgtcactatctggggtaccgggccccctgggtgggccccactgcttccctttccctgggttcaggaaggggcttcagccccactgccctggacccccctggcctgactcccctcctgtccttccctgctccagggtcgcttggcccaaagaggtctgtggggaagctgccatggctcccacagaatcagcccacaggagacaggcatggggcccccaatctcttcactgcccttgggcgagggggtcttccttagagggaatttcgtctctaaacggtcatttctcaggcctcttgacccgacttcccaccatttctaggtgatgatgcaaacacgatgggctttccaggccgcggctcggggtccccaggaggggtcctggaggggaacgcgtggagcccttggggcttctcctggctccagtttgtcctccgcccaggaggggcacatgtgggactgtcctggccccacagcccccgtgacttcggtcctcccgggtctccacccgcccccctccatgtgtggcgggaacggccgcgctcagaggtcaggggtgtggaaagggacgagcgggggaaggttcgggaggagagaggcgcgtcccgcggcgcgcaggacgttcaccccgtgggtcccgcagcgggtctggctggggaggggcccggccgccgctcccgcccgcgaagccgcgcttggagatcccgggcgggaggtgatgtcacccctgtgggctcccgggccccccacggcacctggtttgcggatcgccaggatcctgctgagcccggcgcgggggggacgagggggacctgggtctgcgccgccgcctggagaccccccgagacccccgcggcccctcctcgcccagcgccggagccccgctgcccccttagcccggccgggggcgtcctgcggagggcggagcctcgagccgattggtccctccccgccccgcccccgcaccaaagccccgcccccgcaccaaagccccgccccaccacgaagccccacccccgccccgccccccgcgaagttgctcatcggttccgggatccgcagctgggctcggcgcggccgctggggccgggagggttcgggagggttttgggggctcccgccccgccctcgcccctgccccggccgccccgcgctcctcccggggacctggttcccggcctcctcgcccctccgcgctcgcaacttcggcctcccccggctcccgcccgctctccctcctttgttgcgcgatgagggtcgggtttcggatctgaccgagccgccgccgcgggatggagccgctcagccaccggggcctgccgcgcctgtcctggatcgacaccctctacagcagtacgtgtgccgggcgggggcgggaccccaggatcgggatcgggaccccaggatggagatcgggaccccaggatcgggatcgggaccccaagatcgggatcgggacccaggcaccgggctggtccggggagcgcgggcgggggcgagatcggggtccggatcggggtcgggttgggaatcgggatcggggtcgggacccaggagccgggctggtctggggggcgcgggcggggggtccccagagaggattcctgcggtccgggggcggggaccgtgggcggaccgagccgagagctgcgtcccccctcccacctgttgtgaacccggcctccgcgagcctcaggggagggaggcccttctgggtgctgcccccgcccctggaccggcagcttctctgtccaggctgaagccgaaaggccgttttgggagcagtcgttggcacccgagtttgccaccccaggggcaccgggtcatgtgtggttcagggcccaggggttcggtgctggggtgggatcgggtgggaggggagacggggggtgcagatatccgcgggggccgtttggatgcgggagctgaaaatcccgggctcagcaatctttcctgccagcctcatcaccacccccaccctcatcatcaccaccaccctcagaagaaaaaaaaaacaaaccttctcgagttctccaccccctcgctcccaaatctctctggatcatgtgattgctcttgcatggccccgggggatgcgtaactgatcacgggtaatggtgtgggggggcttggggcgaaccgagagccgccccccgcccccaccaccgcaccttgctcctgctccgttgctagaaaggcaccgccccttctccccacccttccctgagacacctttcccgaaagctctcagggattaggaagagggtcctcctgggcttacatagtggatttcgcccttcctggcccacgtgagtgggaccctcccactctctcagcacatctcccaggcaggagttgggggaggcacgtggggccacgtggagcctggttcagcctgattctaggcactggatgccatggaacaggagcgttttctttctttttttttttttttgagacggagtctcggctctgtcgcccaggctggagtgcagtggcgcaatctccgctcattgcaacctctgcctcccgggttcaagtgattctcccgcctcagcctcctgagtagctgggattacaggtacccaccaccactctcggctaattttttgtatttttagtagagatggggtttcaccatgaggccaggctggtctcaaactcctgacctcaggtgatccacctgcctcagcctcccaaagtgctgggattacaggcgtgagccaacaagggcatttgtaagggtcatcccagctagagttccttgataagtcatatggggggggtggggggagtagagaagggtgatgccttgagccccaaagccttactctggaggctgtgtggtacccaacattcaacctctgacctcagcatccccttgggtccaggtcattccctgtatcttcttctccacccgcctcctcctccatccatgttccttcctctcctccccccaggagctgtccttgtgatggttcattctgctttggtttctcaacatcaaaggggcaaagccggatcccctgggcataggtcctgtgccaggtgccgccgctccatctgctccttcccctgcagaggccagcgtcgttgggtgaaggtcagggcccatggctgtgtggcatgtgcgtgcacgtgcgtctgcatgaatgggggcacacatctgttcggagcgcagatgcagatcagctcctgacccggaggcaggattagtggccctctcttagctgtgtgcttgcaaacagccgtcataacaatgcctcagattcacgcgtgcttatgttcctgagtgtttctggctctttgcaaaacccagttcttgtttccctatttcccgaagcctggaatcgtatggaaccctgtctctagctttctctgcagcagaagactcctctgagctgatcatttccaagtcttccataccccaccctcttcctcccacgcctggagcaaaaaagcaaaattgcctgaggccaccttgaaaattcctgaccagaggaatgccagaaaagggaattaggccaaggcctcttagggggttctgttgggcagccctgattcaggcagattggcacctgagctgtctaccctcctgctgctgccctggcctctgggcggctcctggggtggcctggatggtgggtgggagggggcactgatgtggccgcagtgtgaggagtccctgcctccctcttcggaacagcttagtggagagctgtagcaggaggcttcccggggaggtgctgtgcagtcatgtttgggctgttagccatcaactttcctcttgacaagagcctaaattaaaacaaatacccgagctgtcatttgcctggcagcaaggttttgtggctcccagaggaagttcctctgcttctcaggaagctgtttgcttacaaggctcacagtcctggggtgacaaatctccacaaatgccagatccatcgggaactgtaaagggggtatacccagggcacagggtggcagtgtgacttagagatgggaatgactcggtgttagaggttccctgccttcctctctctgagcattgttcctggtaacaatgataatagcgtctcctgagcacctactgtatggcaggcactgggatagtcactttctctttctttcttttttcttttttttttttgttttttgttttttgttttgttttgagacggggtctccgtctttgcccaggctggagtgcagtggtgcgatcttggctcactgcaacctccacctcctggattcaagcagttcccctgcctcagcctcctgagtagctgggattatgggcgcctgccaccacaacccagctaagttttgtatttttagtagagatggggtttcaccatattggtcaggctggtctcgaactcctgacctcaggtgatcttcccaccttggcctcccaaagtgctgggattactggcgtgagccactgcgcccggcctgtgctaggcactttctatccattctctccaaatctcacaactctgcaactcttacagagtaggaaagtgaggctcagttagcataaatcatagacctaagatcacataagtaacaaatggctgagctggaattcaggttgtaccctagaataatgaggaggatcccgagtaccacctgggtatgtctgagtttattcaaggtcttgggatgtcacggaatgggggacgccattctctatggtcctctgttgcagagttctccctgaaacggtccagcagggtaaatggcttcaatggctctgaccccaacctggccctgtgcctcttgcaggacctgggggctgggcctggagcccaggcagggacagctgaggctgtctgaacccactgaggctggtggctctctgctcctaaggtgccagcctgccagccagcccctcccctcacacacttcttttttttttttgacacggagtctcgctctttcacccaggctggagctggagtgcagtggcactatctcagctcgctgcaagctccacctcccaggttcacgccattctcctgcctcagcctcccgagtagctgggactgcaggcgcccgccaccacgcccggctaattttttgtgtttttagtagagacggggtttcaccgtgttggccaggatggtctcgatctcctgacctcgtgatccacccgcctcggcctcccaaagtgctgggattacaggcgtgagccaccgcgcccggccctgaacacacttcctgcctttggggttggcagttcattctttctggttttgacaggaggagtgtgcccacttccatcacaggtttggtggtcatttgatgagggttgggcagcaaaccctccatctctcctatggtagaagtcctgaagggctgcggtaagtgtgatttgtctgcctcaaggagaagagttggatcccagctgccaggggccctggggctgatgggagcagagtcctttccctgtggagtgacagatggtttcagacatcccccagttcttgtgtctgcgccactcatttgcctgtattaatgtagcaatgtcagtttcacccctcagtaccttacctttctctccctggggttgctatgatgctctctctgaggctctcttttttttgagacagagtctcgctctctcgcccaggctggagtgcggcggtgcgatctcggctcactgcaacctccgcctccccggttcaagcgattctcctgcctcagcctcctgagtagctgggattacaggtgcccgccaccacacccggctaatttttatatttttagtagagacggggtttcaccatgttggccaggctggcctccaactcctgacctcaggtgatccacccgcctcggcttcccaaagtgctgggatgacaggcgtgagcccctgcgcccggccatgttttcttggtcataatgcctctaggtctttaatcaccctttctgctaaacacgtatcatcttctctttgttatttttttattttatttttttatttttattttcccaatcccatgggattagattggattaaatgggagcggagtagcccaaaatgggggtggaggtgtgctctgacactttcttggtccctgggattctccaagcagatctggatcaagacatacgtgtgccccaggcaggttgatcatctggcacctcttcaactggaaaatctttatatgtgtgtttaggacttacttagaggagaggcagaggctgtatttaaagcctctccctttgccacttcggcctccatttggtcccaagtaatttagtcctggtgtcaaacataccttccctgctgagccaagcaagagcctgcagtggcttggccgtcatggaaggcagaacgtgaccatctgttgttactagagcctgctttttggagctcacttctcttaccccaagcaacatttccaagggcgatttcattctcttgtgatattttcatgccctttatagattcagtgccccatctatgggccaggaaagtatttggagcagtggagatgtaagcctgtctccaggtgagcatgagcctacctcagtttctcatctgagccccacattctctacaccagggaccaagccactggtctgacagcctgtgtgcgtttgatcagagcagttcagttctcggggccgcatcagacccctccgtgtgtgctagtgagcgcctgctggcagatgcttgcttgttttcggaatagcccagtaatttattcctttttgtcaacaccggcccataatcttcatggctgctggagtctcagaggtggggctggcagaagaattaagtcatctactcagagaaacttaggtttctgtggttgtgattgttggctactgttgttcttcgggaaaaggaaggaaatttgtggggaattggctggaagatgctgttaggaggatggaagatggggaatggcggggaggctctgcctcactcttgcgagtaggatggaagacttgttctctgtctgaggtatgatctgctttctgggacaattccggtaccttccttcgtagagggagggcatgatggctctcgtgggtgttgtgtggattaattcatatttataaagtgctttgaaggtgaggagagctattgagcagctcagctgtccagctcattgcgctcctcatccgggaaagcctcgagggactgggagaggccggcacaggacttaggaaggggcagggaatgtggcaggaggaccggcaggaacagggtatcagaccagctctgaggcagcgcctcccacagcggctcccgcacaggccctccataggtgttggttgtctgagtacgggtgggaaaaagaaaactcgagttcttggctccttgagctcctccccgcagcagaaacccctgttagctgaaacctgtcagctggcccgtccatgcgtttccggctgtgtggatttggtcattgtactcgctcgtagtggagtcagagacccccaaagggagtctcgcgcttttgccagggtttatgattggaggacttcactgccagcgttggcggcagctgtttggctgagcttgagccctttgggcgcaaacctagggcaggcggcttcaagacaaccctgcgcccactgcccctgccaggcccttggtggtggcgggtgttggtgatgtgtggggggtgggctgaggtgatgtgttgagtggactgaggtgatgtgttgggtgggctgaggtgatggggggggtggactgaggtgatgtgttgggtgggctgaggtgatgtgttgggtgggctgaggtgatgtgttgggtgggctgaggtgatgtgttgagtggactgaggtgatgtgttgcgttgactgaggtgatgtgttgggtggactgaggtgatgtgtggggggtggactgaggtgatgtgtggggggtggactgaggtgatgtgttgggtgggctgagatgatggggggggtggactgaggtgatgtgttgggtggactgaggtgatgtgttgggtgggctgaggtgatgtgttgggtggactgaggtgatgtgttgggtggactgaggtgatgtgttgggtgggctgaggtgatggggggggtggattacctgctctgttctatattcttggcacttttctccaagtgactgtttgtaccagggggagagttctgcagctcacccatctctggggctgtgataggggaggctgtttgtgacatgtgaccttggcttgtccccacatgtgagaaagtccattgctgctgtggggagtagcttgcttttcttttcttttttttttgagatggagtcttgctctgtcacccaggctggagtgcagtggggcaatctcggctccactgcaacctccacctcctgggttcaagcgattctcctgcctcagcctcctgagtagctgggattacaggcatgtgccaccacacccagctaatttttgtatttttagtagagacggggtttcaccatgttggccaggatggtctcgatctcgtgacctcgtgatccacccatctcggcctcccaaagtgctgggatgacaggtgtgagccaccgtgcccggcccaggagtagcttgcatttcttagggcaagatatggtcagttggggacatgacgctgctgggagcagcgggaatgttccactggtccctgaagcttgaggagaacctgacccagagaccttgtgaagggggaaggagaaagaaatcaggccaataggcaggctacggaaggcacccccgtatggaggctgaagataatgcccaatcccacccctgcctgggcatttggcaaagagccctttgaggcgggaccatctgaggccgtggccacttgtggatggagcagcgggttctctgtccccgggtcgagacctgactggggcctctcgcccagttttttgtccaggctttatcctgtgtcctcctcctgcccttccttcctccccacacacactagaccgaaagatgaatctgggtttactggctgtatggaaaatgtcagagtcagcctgggcttcagtagatagagccagatgtggtcggctctgtggtgacctgattgattaatcgggtgccactcccctctttcttcatttttttgagacagattttcactctcgttgcccaggctggagtgcagtggtgcgatctcggctcactgcaacctccgcctcccgggttcaagcagttctcctgcctcagcctcccgagtagctgggattacaggtgctgccaccacgcccggctaattttgtatttttagtagagaagggatttctccatgttgatcaggctggtctcgaactcctgacctcaggtgatccgcccacctcggcctcccaaagtgctgggattacaggcgtgagccaccgtgcctggcctcactcacctccttcttgtccctgccctcacctctgatgccttggtgtgcctctaggtcacaggtggacatggcacacgtgattgggcatcttgcctaaggctagcagggtctccaggaagtcttgggtggctgggaggcctcaggtaaaccagagccaaggaagctcagagtccttgtcactccgggcagcttggctgctggactccccggggcatcggtggagctggtgctgcctagagaagcctggtattgagcagggatctgtgggcttactcggggctgttggggaaggatgtggccatcattaccttcgtgggattgaagggctgcttctgtgagtgttctgggctaaccccttcctcctgggcagcggctcctggtcagcagcaaaggtttaatggatcgagattacggggaccaaagacgccgtgtaattaagccagttatttctctggctgggaacatctactcctcacagccgcaattgacttcgtcacttgtggttaccccgttcgcgttacctcgggcctaaacagcccatacgtcatctttttgagggagtctctcccttggaggcaaagttttaggagaaagatccctctgggagttgtagagtcggcgtggcagtgtgtgctattgaaggtgaagttttaggagagagacccctctgggagttgtggggtcagcgtggcagtgtgtgctatgcaagagtgccccctgcagttgttctgtgcaatggcgcccacgggagcctctttgggaactgtgtctgggttctgtagagggacatagatagaaacctcatccttgggtctcccaggatcctggggtcccgtgaaaagaaagtccatcagtcctgatggattcatagaaactagtttttaatttggtttagaaagaatggaagagacaggccaggcacggtggctcacgcctgtaatcccagcactttgggaggccgaggtgggtggatcacctgaggtcaggagttggagaccagcctgaccaacatgatgaaaccccgtttctactaaaatacaaaaattagccaggcatggtggcaggcacctagaatcccagctactcgggaggctgaggtaggagaattgcttgaatccgggaggcggaggttgtagtgacctgagatcacgctgttgcactccagcctgggcgacagaatgagactccatctcaaaataaataaataaatacataaacaaactaaattaattaattcaaggtcgcagactacaagccagggactgtgcgctcggttggccctgctgtaaactgtgttctttctcccgcactcttacccttcacagcggtgctggtgggggctccttgacgctggtatttcactgaggttgatggatctgggttcatttctctagctagaaagacagttgtgaagactgcgtcttgcccccaagcccccgtgatatgaggagacagccctctgccccaggcatcctggaagcactgggagcatccaccaactgggctgcctcttcctaggggcatgagcctaaggaggtctcctcatgggcacttggagcccacgtgcctgcattgctgtgttcctggaattattggcaagaagtgctgattgttaacatacacaaacacaccccccccccacacacacacacacaaacacaaacacaaacacacccccccatacaaacacaaacacagagaaagggagagtgagaatagactttggcggttgggatggagcagggccagtgcccagtttctagagcgaggccaggggcgaggacgcggggatttggcagagcccaagcgtgctggccctgctctccagccttttaaaatccacctccacatttcaaaaggaaaataaagagagccctcagccataaatcaggccactgagcatcgaggtcctttgccgaggcccagggcctgctgggctgcagagccagctgctgtgtttgaactctcccgcgcgcagcatgttaatgacggggcagaccctccagacccaggctcacacccacgacggccctcgagcccagagagtcccccacggagaggtcagcccctggggaaggcctgtgtctggggggcttacaccttagcggagccccctttggctgggacttcaaatcaagccagacccttctgtagctctggattctggccagatgaaaggtaacccctgacacagatcttttgagcccatttcccaataggaataaaagtaacaaagcaattgattggacacctcacgggtgcaagagtagagcgagcgttctcacattcgtgatctcatttcatcttcacagtaaacctatgaaaggttgttaccctgattttaaggataagaagggggattggccattgttcttggcctctgctggtgacttctgccatggggggcaccctgagggggacgcaccaggtcttctctgccctcctctgctcaccctcttcctgcgtggcggaagctcaggcatcatctggctttgtgagtgcctctgtctagacaaaacccacgtcctccctccctcctctttcccctgcagggccagctttggtgttaatggagcagaaagccttggtagttactttgcgagtgcgtcacggggagggtcatgagagaccagctggcgtccacccagccgcgtggaacagccaccttgacttggtcgaggccagcaagcgtcttgcagaccccgtggcagctcctgacccacgttcccccttgggaggcctggatgagctggggcaccaagtgccatctttgggtgtagaatcttcagaaaccaaaggcaggagctgattcggtctcctgctccctgggaagaaaggatggaacgcacattggctgtcaggagagctgctgcttctagccggaggaccttgctgcagctggtcagctgccagcacagccaggcccttgttgtgggtgcctgccgtgtctgtcctcaagcccctccctgagtgaaggacactgttccctttccaactgcctgtggctgtgctagaccattttctctcctttgcccagaaaccttcagtgggttcagtggggcattgcctttcccaccacattcagtccagactgggggaacctcttgttatccattccagtttcccagcacactgcccattctctagccagtaaggcctctcaccatcctgcaaagctctgtgctccaaggatctaaccagcttcaagcctcagctcagctaccaccatctccaggaagtcctccaggcctgattcgagcactggccttagtgagatccctggctcagagtccctaatgctgattgctccggctcacatcgcttagcactttcttatctttttttttgagacagagtctcgctcttgtcgcccaggctggagtgcaatggtgcaatctccacaacctctgcagtgctcactgcaacttccacctcccgggttccagtgattctcctgcctcagcctcccgagtagctgggattacaggtgtgcgccaccatgcccggctaattttgtatttttagtagagacgggatttctctatattggtcaggctggtctcgaactcccgacctcaggttatctgcccacctcggcctcccaaagtgctgggattacaggcgtgcgccaccacgcccggctaatttttgtatttttagtagagacggggtttcaccatgttggccaggctgctttgaactcctgacctcaagtgatctgtccgcctcggcctcccaaagtgctgggattacaggcgtgagcgacccgcccggccgatatcgtgttgttttatagtgtttacctgcacagtgtttcatgccagttgtcatttcttctctgccagactctcaactccttagaggcacgagggagaataacaaaggcttccgtgataggatgccagacattgtcctctctgctttgctaacagtatctcatttagcctccggcaacctgctgagttcttagccatttttatcctgtttcatgcttccccaagacttcccagaggtcacacaacacatctgtcttgacgcctcagcctgtgttctttgccagaagcgcccaatgccagggcctggggcatgagacctcaggttggggcccaggcctctgcatgtctgaaaagctcctcggcttactccctccgctcgggggaccagcctttcaccatggtggttctcccttccccgcaacacccagctaggcaccgagcaggtggaaccctgggaaatgctgctttgtgattggttggagtcaggggtggctatgaagatgctgctttgtgattggttggagttgggggtggctatgaagagacgaagtgctctagggctctgggtgtctggatccagcactggggatgccccggagagtcctggagcagggaggatccaagcaggaggtggagctgggtgttaggagggcagaagggccatcagaaggggatactggagacatccaactggtggcctctctctccgcccagccagagctcaaggctttgcctcaccccgagaagataaatcactggggtatcacggggtcccccagcccccgtgccatgatggacatgcacattttgatttggcaggtccggagctcagattctgcatttcctttgtttgcttgtttgttgtttttgagacagagtctggctctgtcacccaggctggagtgcagtggcgcgatctcagctctcactgcagcctctgcctcccagttcaagcgattctcctgcctcagcctcccaagtagctgggactacaggcgcgtgccaccatgcccagctaatgtttctgtatttttagtagagacagggttacaccatgttggccaggctggtctcaaactcctgacctcaggtgatccgcccgcctcggcctcccaaagtgctgggattacaggcgtgagcccctgcgcccggcctggattctgcatttctagcaagtcccaggtgaggcccgcgctgcccacactggatgggaaggaccaggcgcctgcagcatctgccctccaagccttcgtagctccctccttcctgcaggataaactctaaactccttagcacaacgtgggagccttctcagagactgggtccaacccatctccagccgcagcctcccctcctggccccactgccacacccccgggcctccggccacactgagcctctcccggtttcccaggatacaacactcgcccattcatagtgtggtgccttttgcacgtgctgttcctctgcttggggatgctgttggtctttctcagccaggtgaagaggacgctgaatgtcacctgcttgagtatcaggaccggggactgggcactggacctagactcttggccctggagagaagccctgcatggggccgcagcctgcccccgtccctgctcacagaaaagctcagccttgcagccgcgtggagtcagacgacttgcctgtcctgctttgaacgtgtggtgttcctaccacctttgagtaaaaatagagctgagaatgaccgaagtgaaactccaccttgggctctgggagagcagaggtgggaccacgctggggagggtgggtgcggacactccgggggcgggggctgaggccatctgcgtgggctctgggagagcggaggtggggaccgcgctggggagggtgggtgcggacactccggggggtgggagctgaggtcatctgcgtgggctctggggagggggccctgtgagccgggccaagctgccaggcactgggggtctacgccctggactcagagagaccatggcaccctcaaggctgctctcacttgaaaattttcgttttggggctggacatggtggcccacgcctgtaatcccagtactttgggaggctgaggcaggaggatcacctgaggtcatgagttcgagaccagcttgcctaacatggtgaaaccccgtctctactaaaatatacaaaaattagctgggcgtggtggtggatgcctgtaatcccagctactcgggaggctgaggcaggagaatcacttgaacccgggaggcggaggttgcagtgagctgagatcacaccattgcactccagcctgggcaacaagagcacaacttcgtctcagaaaaaagaaaaaaagaaagttttcactctgggctgtggaactatttcaggacttcctgaggggtttcctctggagcttcctgagtttcctcctggacattttgtctccaggtcccagcgccaggcaggggtggctcccggaagggctgtgggtgccaccctggctgactgcagccctctcttgcacctcctcccggccatccacccgcaggaggtcttcccccagcactggcttgtgaggagctccctctgcccgggagaaaatggctcctccgggtcacaggctcccctccagggactgaggggcatttttggattgtgggaaggcgctccagggcccggttctgtggccccaggcctgttgctcggctgggtggaggcacctctgcaggccgggagcttggtctttgaacacctgcttagcctatgacctccagcaagttatttatgctctagtgagctgtgtttttctcacctttagaatgggaacaatcttaccaaccacactgaaagcactgctgagtttttcagcaaataaaaataaggatgccccgttaaattagaattttagatgaacaatgaataatttttaaatataagtatatcccatatggctgggcatattgggaggccaggaggatcacttgaggccaggagctcgagaccagcctgggcaacatagagagaacttgtctgtaataaaaatacaaaaaattagctgggagtggtggcagacacctgtagtcccagctcctacggaggctgaggtgggaggatggcttgagctggggaagtcgaggcttcagtgagctgagatcatgcctctgcactccagcctgggcaacagagtgagaccctgtctcaaaaaaagaaaagtaagtatatcccatacaaaacttaggacatagtagactgaaagctagtctgttgctcacccgacgttcatgttcactgggcgtcttgcattttatctgtagaccgaaagcttgtctgttgctcacctgacgttcatgttcactgggagtcttgcagtttatctggggtccctgagtctggattcagtgctgtgtgtgacactttgccagggtcccacctagatgctccgacatccatgttcactgggcgtcttgcagtttatctggggtccctgcgtctggattcagtgctgtgtgtgacactttgccagggtcccacctagatgctccgacatccatgttcactgggcgtcttgcagtttatctggggtccctgcgtctggattcagtgctgtgtgtgacactttgccagggtccgtcctacctagatcctccgacatccatgttcactgggcgtcttgcagtttatctggggcccctgcgtctggattcagtgctgtgtgtgacactttgccagggtcccacctggatgctccgacatccatgttcactgggcgtcttgcagtttatctggggtccctgcgtctggattcagtgctgtgtgtgacactttgccagggtcccacctagatgctccgacatccatgttcactgggcgtcttgcagtttatctggggcccctgcgtctggattcagtgctgtgtgtgacacttcgccagggtcccacctagatgctccgacatccatgttcactgggcgtcttgcagtttatctggggtccctgcgtctggattcagtgctgtgtgtgacactttgccagggtcccacctagatgctccgacatccatgttcactgggcgtcttgcagtttatctggggcccctgcgtctggattcagtgctgtgtgtgacactttgccagggtcccacctagatgctccgacatccatgttcactgggcgtcttgcagtttatctggggtccctgcgtctggattcagtgctgtgtgtgacactttgccagggtcccacctggatgctccgacatccatgttcactgggcgtcttgcagtttatctggggtccctgcgtctggattcagtgctgtgtgtgacactttgccagggtcccacctggatgctccgacatccatgttcactgggcgtcttgcagtttatctggggcccctgcgtctggattcagtgctgtgtgtgacacttcgccagggtcccacctggatgcgtcttgctcatcttgtgacttgcttctctcttttgtgccaccccctggctcctagaggccaagctgaagaaaagtttctatggaattgtcacagaaacattgagattttgcttttacagggtcgatacagagtcgacacaaaaaatcacgatgcgattgatgcagagtggccagtgataatagctaacgttagcctagcgcttgctgtgtgtcctacactgttgcaggcactttgtctgtattaactcccttattcttcacaaagtctatgaagaagatacttatcatctccagtttacaggagagaacagagaggcacaaattaatggagcaaaagattaatgttcatgttcttttttttgagattgagtctcgctctgtcgcccaggctggagtgcaatggcaggatctcggctcactgcaacctccaccttctgggttcaagggattcttttgcctcagcctcctgagtagctgggactacaggcacccagcaccaagcccagctaatttttgtatttttattagagacggggtttcaccatgttggccaggctggcctcaaactcctgacctcgtgatccacctgcctcagcctcccaaagtgctgggatgacaggtgtgagccactgtgcttggcctagcctttcaaagtgctgggatgacaggtgtgagccggggtgcttggcctagcctttcaaagtgctgggatgacaggtgtgagccactgtgcttggcctagcctttcaaagtgctgggatgagaggtgtgagccacatccattagggcccgtcaggaagcagatgccacactcaggctgaggagtgcggggagagctatgacggaaatgtgggcagggtgagggcagggtctgtgtcctagacctggaggcagaggccatgtggtgagggcttctgggcaggagcgtgcacagcccgggtggcccacagtggggagctgggggtaccacatcccagcctcatgcccttgtcttcctctcatctcctgctggggtggaagagaggatggagaagcagggagaggggatccggaggggcccacgccaggaaaccaggctgtgtctaggtgcagctgttcttgccgagtctctcctgtctgcaaagtgagggtgataaacgcctgtcccacgtatgtcctggggctgttgtaaaaatcagctgagaagctggatgctggcgacgtgtgttcacggcgctgttctctgccagagtaagggataattgttgctgttgataaacactcactgggtcctcaccacgaactgagtcttttcacatcctcagttctgctgggagtctctaacctctggaggatgtgtcggcaaaggaaagagaaattgcaacattgcagagcctggattcgaacccagcgtccccatgtaaagtccgtgcagcactgggagagtcacttaatgagcctccgcagtgaaatgcatctcccgggctggtttggggctcccaggggaatgggtgctatgattaccattagctagtggtgtagcgggtgggagaggacctaacaggtgccttcggcccggctgtaaaaggagtgacttctggccgggcgctgtggctcacacctgtcatcccagcactgtgggaggtcgaggcgggtggatcacctgaggtcaggagtttgagaccagcctggccaacatggtgaaaccctgtctctactaaaaatacaaaaattagctgggtgtggtggtacacgcctgtaatcctagctactagagaagttgaggcaggagaattgtttgaaccctggaggcggagattgcaatgagccaagatcatgccagtgcactccagcctgggctacagagtgagacctcatctcaaaaaaaaaaaaaaaaatagtgactttgaccgggcacggtggctcacacctgttatcctagcactttgggaggcagagatgggaggattgctcgagactaagagttcaagaccagtccgggcaacatatcaagaccctgtctctacaaaaaaaattttaaaaaattagccaggtgtggtggaatgcccctagagtctaagctacttgggaggctgaggtgggaggatcatgtgagcccaggagtttgagcttacagtgagctgtgatcacattctgcactctggcctgggcaaaggaatgagaccttgtcttaaaaaaaaaaaagactggacttgtgggtgacggggatttccaacaaaaccttcccaggataggtgctgggaaggagatgagactcagaaaaaaaaaaaagactggacttgtgggtgacggggatttccgacaaaaccttcccaggataggtgctgggaaggagatgagactcagacaccccagccttgtatccctgagaagggatggtgtccttggaacgggaatccacatagatatttagcaggcagggcggtccagcgacacctgcccgcttccctcagaaggcaccgtctgcagcactcgtacaggtggcggggccagagagcaaggctcgatggagtgacgttgcctccaccgcacgggcgtcccaccttgggagatttccgtatcgctgaagttccctttgtggagcgtggcctctgtgaaaagtgttaataattcacggtagaataggttctcagatgcgccacgtctgtcctcccccacttcttcaacagagaatggcaacacctccattaacctgaatgtgagctcctcgggggtggccctggctgagtcatctgcgccgcctccctccccagagcctcgtacgcgctcggcgtctggctgtcgtgtgaactcagctccacagggcagacatttggtctgtttgctgctccgtcgtacccctggcacctggaacagtgcctgaaccatgagaagtgtttggtgagtgaatgaatgaatgaaaaatgaatgaacggacattcactgggattcagttctccttagagtcagagagacgtaggtgtcaatgctggttgcatgaagctgttacatctttgagcctgtttcctcatctgaatttggggtgtaattcctactgactgtacagttgcagagctgacatttcatgaactttgcttaaataatgtgtgagtgcctggcccataagaggctgtgttagtccttttgtgtgtgtgtgtgtgtgtgtgtgtggtttttttttgttattgttttttgtttttgagacagagtcttgctctgtcgcctaggctggagtgcagtggtgtaatctcagctcactgcagcctccacctcctgggttcaagcaattcttgaaccttgtaccagagaggagaggtacagcggccctagaccccagggctctgctcctattggtgtaagtgtttcctcctgcgccctacctccctgtctccaggcagggcctgctgtgggtccctctcctctcagccccaagggacctgttccctccagaaggcacctccccaagcggcggcagcgtcacgtgtgaggcctgcagttcagggccagcatccctcatccctcgccgagatcaggccctggaggggctcccacaggtctgactcaaaggcacaggtccctgggcctccctcctcagcatcgtggacccacgaccaaggacgtggaagggattctgaagattaatggtcgtaagtgtcactggcttttactgagtgcttcctgtgtgtgagtactgcgttcctacttctcctgtgtgtgagtaccgcatacttcccttgtgcgtgagtaccgcattcctgcttctcctgtgtgtgagtaccgcattcttacttctcctgtgtgtgagtaccgcatacttcccttgtgcgtgagtaccgcattcttacttctcatgtgtgtgagtaccgcattcttacttctcccgtgtgtgagtaccgcattcctacttctcccgtgtgtgagtaccgcattcctacttctcctgtgtgtgagtaccgcatacttcccttgtgcgtgagtactgcattcttacttcccttgtgtgtgagtaccgcattcttacctctcccgtgtgtgagtaccgcattcctacttctcccgtgtgtgagtaccgcattcttacttctcctgtgtgtgagtaccgcatacttcccttgtgcgtgagtactgcattcttacttcccttgtgtgtgagtaccgcattcttacctctcccgtgtgtgagtaccgcattcctacttctcccgtgtgtgagtaccgcattcttacttctcctgtatgtgagtaccgcattcttctcttgtgtatgagtactgcattcctacttctcttggactcctgagagttccatgactaagacagtagtttaatatagttggtttcctttgtcatcctgcatagtttagttttacgcatttcaaaacattcttcagagaaaggtcccttggcttcaccaggctgctgtgggtccaaggcacgaaagcatgaagagtctctgctcatcgccagaggactgtgagtcccaaacaggctccctgtagtctgaacaggcttcagccttctctgggtaatcctaggctgtggttacaacggtggctttggctgcactgggaggcaggagatctgggtttttattctacctccgccactcccatgccagccctctgtgtcctcagctgtgaaatgtaagggttggactagccctacgcacttttgattccttttttttttttaagacagagtcttgctctgtcacccaggctggagtgcagtggcacggtcttggctcattgcaacttccaactcccaggttcaagcaattctcctacctcagcctcccgagtagctgggactacaggtgcccaccatcacgcctggctaatttttgtatttttagtacagacaaggtttcatcatgttggccaagctggtcttgaactcctgacctcaggcgatctgcctgtctcggcctcccaaagtgctgggattacaggtgtgagccaccgcacccagccattttctgtgttatatgtgaaatgtagcaatatgcaaaacagcacatacaatgtctgggtttggtttactaaagactaacgagacggctgggcgcggtggttcacgcctgtaatcccagcagtctgggaggccgaggcggctggattgcctgagtccaggagtttgagaccagcctgggcaacatggcgaaactccatctctactttaaaaaaaataaataaatacaaatttaaaaaaagaataaaaagaagaagaattacattgtaagcatgttcctgtgagctgcccttttctggttaaatttatgtttttaggttcatcttcgctcctgcctgtagctctaaactgtgcaccgtcaaagctgcctggaattccattgcaggaataaatggcggcttactcaggggtggtcacgctccttccacctgttggaagagaatccatagtggaaaatcatttcatgctgcaacgcgacacacatacgtacatctgcacacacacatatacccatgcacgcttgaaatgagcctcataaagtaatacctgcccttattaggcgagataatccttttcaatccattctagaaggtgacctaccaaactgcacgatcccttcctaggctgacctgcagcatgaatgatacggggctgagtgcaccccatcgtgggtctgcctgggtgcgcctgaggttctgtgcctggcaggcaggctcaggtcatggtcctgctgatcccaccaggctgtccgcacgcattggcgtgagagcggtgtgcctgccggttcctttccttcatctgccgggattgttggcttccccctgttccgctgggcgtgttccagcagcggctcttcccttgtagttgctgcttctcatggcctgtggcctgagggaccagccccctaggcatgttagaactgtgtgcactgaggtcgggcgcggtggctcacgcctgtaatcccagcactttgggaggccgaggcaggcagatcacatgaggtcaggagttcgagaccagcctggccaacatggtgagaccctgtctctattaaaaatataaaaattagccgggcgtggtggcgcacacctgtaatcccagctatttgggaggctgaggcaggagaattacttgaacccgggaggtggaggttgcagtgagctaaggttgcacctttgcactccagcctgggcgacagagtgagacttcatctcaaaaaaaaaaaaaaaaaaagtaatgtgcgctgtagcacgactgacttagtagcaagagagggtagtgtctgagaccagactgcccgggttccaagctttgccactcagcagctgtgtgaccttgggccagtcatctgacctatctgagcttcggtttcctcatccgtaaaattgagataatattagtgcctgcctcctggcgcggtgtgaggctgcggtgagttaacttatcgtatgtgtgtgtggactgttgttattactgagcctgcctgtgcgtcagagcctgacattgatctaattctttgctggtatccctggacacagtggctgtgttgaaatgagctcaaaaccctcggctaaaaggaggttggaggtggacggaagagccacttctcaggctgcctgtattcagatcccagcctcaccattaagtaactacgtgactatgagcaagttagtccatctccctgtgcctcagtttactcctctatgaaatggggatagtagtggaactcactattcaccaagtaattgttaagaggattacataagataatgcacataaagctttttttttttctttttgagacagagtctctctctgtcacccaggctggagtgcagtggcacgatctccactcactgcaacctccgcctcccgggttcaggtgattctcctgcctcaacctcccaagtagctgggattgtaggtgtgcgccaccacgtctggctaatttttgtatttttagtagagacgagttttcaccacgttggccaggctggtcttgaactcctggcgtcaggtgatccttccacctcggcctcccgaagtgctggcattgcaggcgtgagccaccacagcatttagctctgccgtctacccggctacccagccaggaactcaggagaggccttttttttttcttcacatgaaaagaggtttattttctcactggacactgtcgcccatgtgaagggagcagccacctggccccaggttccctctcaacaaaggctcagtcctcagaatggctcctcatgagccccctgcagccggaggcctaggctcttccccacagcatgtgccccttagatacccgtctgccctctggtgtaggctggtgggcatgggtgtctgaatttgggtccccacagcacccccattgaggatcacagtgttggagttgaacctggggccacctgggtaccaggacactgtgctccacggtgagcacctctcctgtccctcgatggccagcaggatctggtcacccacctacctgccaccctatccttttttttttttttttttttgagacggaatttcgctcttttgcccaggctggagtgcaatggcgcaatctcggctcactgcaacctccgcctcctggattttcctgcctcagcctcccgagtagctgggattacaggcacctgccaccatgcctggctaatttttgtagttttagtagagacagggttttactatgttggttaggctggtctcaaactcctgaccttgtgatctgcccgcctcggcctcccaaagtgctgggattgcaggtgtgagccactgcggccggcctagatgtctttttatcgttgagttgtaagatttttaaaatatagtctagatatgttttcttcccctctgcacattgtcttttcactttcttgatggggtcctttgaagcaaagaagtgttcattgatgacgtgcggttcccccgtgctctctgttgcttgtgcttctggtgtcgtatgtaagaatcctttgccaagtccaagaccatgaagatctacccccaggttttcttctacatgttgtttagctttagctgttacatttaggtctttgatccatttagagttattttttgaatatggtagaaagtaaaagttcaacttttacatgtggcaatctggttgtcccagcaccatttggtgaaaagattcttctttccccatgaagggtcttggtgcccttgttgacaatccgtcgaccatagatatgtgggttcctttctggactcactcaacgtgactccgtggatctgtgtgtctggaaagatgcccccagcctgacagtttaccttctttgcccatctgctccagtcatcctggaggctcccatagtacacattgctgggacatcccagagctgaacaccatctctcaagtggcctcagagctaatcacttcccacaggcatcgaggcgaccacagagagggcccagtgtgactggctggcccccagggcgcccgggaagggatctgcagatccctcctcctggcacagcgtcctggcaggaggcacggtcccagagcaggccctgtttgtgctgaggccccgccaggattgggtggatgccttggtgagggccaggtaggagggaacaaatgcagggtgggaagtggctgctggaatggggaagggagcggggcctgcaggagggaagcattcttggcactagtggcatcgtcaccaggacaccggccttgggagggcgagcactacatccatgggtaggcgccggagccctgaggacacggcattgccaagctcttgtcctgtggcttccttccctgtgtccgcagtgtgtggggggtgggcgggcaggcaggacgaggtgacccccatcctttctgtgtgctcgttccatgaaattgggggatgtggatgcttgaacgggctctcagctagtgtgccttccgtgcagaggaggtaacactccccagggcagccagacacccttgtggagtgggatggaaagctgggaggaaggggctggccggcaccatggagatattttggtttgcaggaggattctgggctttatgagcactttaatgcaaccagggcaggcagcaccacgggacgggaactgtaagctgcacctgttgaattctgaaggtccgggctgcccgtgggccccgggaagtgggggtgcccagcttgtggggtgcaggcggggaggggaccgtgtggtggtggagacgccatggtacagcctgtctcccgatcccccaggtcccctgaggccttagagatgaatctcccagaagtggcagccgcggcagggacaccaggatcatgaaggacctgggaggtgaacccgctgctcagttcctggccctcgtcccttagacccagtcctcggagcagaactgggggaagctgagatttctgtgggctgcgtgcccacctcctccctcttcgttggtcctcccacgcgcccgcccccgagtgggagcagagccatgtgagctgagttggagctgctcgctgccgagaattgcatcagccccgcctggcaggctggagcgggagcctgttgctatggtgaccaccaggcttcaaaccagtgagaaggatgagatggttgccgggcgaggttttctcaccatgtgatgcgtgtgacaggctgacaggttcggtagacctggacccagccctcccgtaggtgtgcctggacccccagccctcccgcaggtgtgcctggacccccagccctcccgcaggtgtgcctggacccccagccctcccgtaggtgtgcctggacccccagccctcccgcaggtgtgcctggacccccagccctcccgcaggtgtgcctgggtccccagccctcccgtaggtgtgcctggacccccagccctcccgcaggtgtgcctgggtccccagccctcccgcaggtgtgcctggacccccagccctcccgcaggtgtgcctgggtccccagccctccccgcaggtgtgcctggacccccagccctcccgtaggtgtgcctggacccccagccctcccgcaggtgtgcctggacccccagccctcccgcaggtgtgcctggacccccagccctcccgcaggtgtgcctggatccccagccctcccgcaggtgtgccatctgctggggggcatgatgggcactgtcccaaaagccatctgggcattggccaggctggggggtatgactgagggacacagggggccacgccaggcccatgtagtgtcagggggccttccttggtccttctgcctagttgtgggggaaggggtatggtggggatttgaccaagtgcacctgatgatggggcaagaaaggggtccagactggtccccatctcccagaacagagggcggctctggatcacagctgattaaacctgcccaggctgtgtcaaaaattttttttttaacggagtttcactcttgttgctcaggctggagtgcaatggtgcaatctcggctcattggttcaggcgattctcctgcctcagcccaagtagctgggactacaggcgtgcaccaccatgcctggctaattttgtattgtcagtagagacaggtttcactgtgttggccaggctggtctcaaactcctgacctcatgtgatccacccaccttggcctcccaaagtgctgggattacaggcatgacccaccgcgcccggcctgtgtcagaattttttttgttaaccacgtgacaaagctcatcatcttgctaaagataacagagcgcttggccaagccagtgcaatgcctgggttcagatctcctctctcatcttttgcctacaacgggaaaggaggtaaaaagtctgtgttccaggtgtgctgagcacttgttgtgtgccgggagttgtagtagacactgtcctgtctttttttttttttgagacagagtttcactcttgttctccaggctggagtgcagtggcgcgatctcggctcactgtaacttccacctcctggactcaagtgattcttctgcttcagcctcccgagtagctgagattacaggcacgcaccaccacgcccggctaattttttgtatttttagtagagatggggtttccccatgttgaccaggctggtctcaaactcctgacctcaggtgatccacccacctcagcctcccaaagtgctgggattacaggcatcagccaccagcccagcctgtcctgtctttttttttttttttttgagacagagtctcgctctgtagcccaggctggagcgcagtggcgcgatctcggctcactgcaagctctaggttcacgccattctcctgcctcagcctcccgagtagatgggactacaggcacctgccaccacacctagctaacttttttgtatttttagtagagacggggtttccccgtgttaaccaggatggtctcgatttcctgacctcgtgatccacctgctttggcctcccaaagtgctgggactacaggtgctcaccaccacgcctggctaacttttttgtatttttagtagaggcggggtttccccgtgttagccaggatggtctcgatctcctgacctcgtgatccacctgcttcggcctctcaaagtgctgggactacaggcgctcatcaccacgcccggctaacttttttgtatttttagtagagacggagtttcctcgtgttagccgggatggatgtcctgtctttctattgtatcctctccctcacttggggaggaggcagtgatgttcctgttttgcagaagagccggatcgggcagccagagagttgaagtgacctgcccaaaaagggttcaacctaaatccttgggcttcctgtccagggctctgtaggatgtcagccatccccagaatcaggcattctcaggatgtcctgtgaagaaacacacttctccatcccctgctggaaaaaccatgacaatctctccgcagggaagaacgcggctttgaggtggggagtggctgaccgaggccctttgtggtttctaaatggcagaatgagagaggtgggggcgttgagggtgtcacgcccaggaagcagttggggagggcagggctggacactgaccaagcctagcctgggtgcaggaactgagcttgggatttttgcttggggccctctagggattaggatgaattgtcagatgagttctcagcagacagggctttagggaactggtccagggaaataagacgtagagccagaggggaaccagggcctctgtgagagcctggcagtcatgagatctgacttgctgagcttctgaggtgtggtaataggaactaatcctctcttcggtgtgctttagatgtttactcgtttcatcctcacagaaaccctgtgaacttgggtgctactgttactccatgttgaaggtaaaacagaggcacagagaggttatgtgacttgcccaaggtcacacagctggtaaggggtggagcctgtgattcagacccagtcagtctggctgcagagcatgagctctgaatcaaatgttctcctgcctccattcttaccttttagaaagatgacagcaagttgcatacgtgacctcctcacccccaggagtgtgtgtgtgcacatgtgtatatatatgcacacatacgcgcaccagtagctcagcaagggagggaggctcaggaatgggctcgtgggcctctgtgtgttgatggctgggtttgcagaacctagggagtccggcgtctgtgtgcgtgatgctcctcccttcgtccctccctgctcgcgtggttcccagtgggtggggtgccctgttgcctctggtttagagccgtgcaggatgttaccacagaccgtgtaccaggagtgttcacccaaacttgtgaagggccctggactcccaggaaggagctcagatctaggactgggagtggacggcggccgccggaggagtgagagggggcagtgcgcttgccatgcccggggcccgtcctcctgggcctctctcggcgcttgggcaacctgtgtattgcccacacgtgtgccgctgcttgcagctcctggccaccaccctcctctttgtgtctggacgaatctgactgctctgagcacctcttcagagtggaatcatacaggacagtgtctaccgcaactcccagcacacagcaagtgctcagcacacccggaacacagacttcttacctcctttcccattgtgggcaaaagatgagagaggagatctgagtgcagacatcgcgctggcttggccaagtgctctgttatctttagcaagatgaagagctttgtcaggtgggtaacaaaaaaaattctgacacaggccgggcgcggtggctcacgtctgtaatctcagcgctttgagaagtgtgtcagcccttgagaagacaccgggcaagctggccttcctctcggtgtctctcccaggccgggactatggggagaaatcataacaacagggacaacagcagtgacaacgtcagtgacgacaataacagccactaacgttataccacgtgccaggccctgttcttagaacttcgcctggactaactcattcaactgtcacaaaagctgcatgggatgatgttgttatgttattatcttcatttgacaaatgaggacactaaagcacagagagatgaagcaacttgccccaggacacacagctaaaactgggagtggaattcggagagcctggctcctggcatttggagctgacaggtgcccggcaacccctacctatggccgagctgagctcgtcttgtgccagggagttggcggcaaaacagaaatgagctctgggccgggcacagtgcctcacgcctgtaaccccagcactttgagaggctaaggtgggtagatcacctgaggtcaggagttcgagaccagctggccaacatggtgaaaccccatctctactaaaaatacaaaaattagctgggtgtggtggtgcatgcctgtaatcccacctactcgggaggctgagacaggagaatctcttgaacccgggaggtggaagttgctgagatcacaccaccgcactccagcctgggtgacagagtgagattctgtctcaaaaaaaaaaaaaaaaactaaaaccagaaatgaattctggaggtgggatcttcctttgtaattcagaaggtgactcccaacccctcttcagaagctgggtgggctccaggcctggttcagccccctggcctcctgtcgatacccatgggggggtctctgtccctggtattactcctttcctgtctactttttttttaaatttagattttattctatttttttaaattatggcaaaataggccgggcgctaggtagctcacgcctgtaatcccagcactttgggaggccgaggtgggtggaccacgaggtcaggagatcgagaccatcccggctaacacggtgaaaccccgtctctactaaaaatacaaaaaaatttagccaggcatggtggcaggcacctgtcgtcccagctacttgggaggctgaggcaggagaatggcgtgaacccaggaggcggagcttgcagtgagccgagatggcgccactgcactccagcctgggtgacagagtgagactctgtctcaaaaaaaacaaaaacaaaaacaaaaaacaaaagaaaatcatggcaaaatacacatgcctaaaattttccatccagtgtacgcatcagtggcccgaggcacgttcacactctggtgcggccatcagcaccgtcatctccggaactctcacctggctaaactgagactccgcatctgtgaaaccagcgcaccagggaccggcttcgtggaagacactttttccacggaccggggaagggtggggagcgctttcgggatggaactgcgatccctcgcacgcgcagatcacgacagggctcacgctcctacgagaacctaatgccgctgctgctcggatgggaagtggggttcagggggtgacgcttgctcacccaccactcacctccggctgtgcatcctggttcccaacaggccacggactggtgccggtccatgcccgggggggctggggacccctgtattgaacaacagctccccgtttctccagcccccagctcctggccaccaccctcctactttctgacttgatgaatctaactgctctaagcacctcatccgagtggaatcatgtggtatttgcctttctgtgaccagcttctttcacgtagcctaatgcccccaaggttcatcgatgtcagaattggcctgtgtcggaatataagccgaataatatccgttttatgtaaaggccgcgttttgtgtatccattcatccacccatagacacttgaggtgtttctgttttttggcaagtgtcaataatgctcttaggaatgcgggtatttccccgacaacctttgggcttacttcactcatcagcagcaagcaggccatccttgaagcttaccgtggggtgggcccattgaccagcctggggagagtgggtgggtcattgaccagcctggggccatcatgctggctgggaaggcgtggccctcaggtgccagcttctacccaacactaagccgttggtgctcctggcacttacttacttgctggaagacattccaccttgctttcccgtctttccccagaagagggtgctgggtttctgcttctctcctgaatgggaaaagggcggctgcagcttgccatgaggctggcgtgggtggggttaggagaaaggactgtcaggtgctgtgttgggaagtgtgtgtggagcttccgtgaggctggggttggccttctgagcatacatggaagggctgagtgggagcagggtgttagggtagccggtcatgccgtagaaccaaattaatgctgaaggccgggcgtggtagctcacactaatcccggcactttgggaggctgaggcgggtgggtcacctgaggtcaggagtttgagaccagcctggccaacattgggaaatcccatctctactaaaaatataaaaattagctgagtgtggtagtgggtgactgtaatcccagctactcaggaggctgaggcaggagactcacttgaactcaggaggcagaggttgcagtgagccaagattgtgccactgcactccaggctgggcgacagagtgagactctgtgtcaaaaaaaaaaaaaacaaccaaaaccccccacaaattactgctgaaatcctcatcacttaacacaagcaagctgctgcttgctcacagtggtcctggtagacggggggctctgctccccgtggtcatgccgggacccagcctgatggagactgcaccatttggaatatgtggcctccaagggtcacagagggaggagaaagggagaaagagctgtgtgtaatttttcactgttcagccgtgaaatgatacttgtcatgtccacttacagtttgttagccaggactgagcacctggccctgcccagggactgccaagtggccagacagtacggccttccatgtgcccagaaagacaggaggatggggatattgctgggcactggtcgtgttgaccacatagtggcaggtggcttatgtgaaggatgaaggcccttgagcctgctctgtggccagggcagtggtgtcatggtggcagtggtggcagtggcggcagtggtgtcatgtagcaatggtggcagtggtggcagtggtggcctggtggcagtggtgtcgtgtggcagtggtggcctggtggcagtggtggcatggtggcagtggtggcctggtggcagtggtgtcatgtggcagtggtggcagtggtgtcgtgtggcaatggtggcagtagtggcagtggtggcatggtggcagtggtgtcgtgtggcagtggtggcctggtggcagtggtggcatgtggcagtggtggcatgtggcagtggtggcagtggtgtcatgtggcagtggtggcatggtggcaggtgtctgggcactgaagggacttgggtgtaactgacttctaggggaagtggcagaatcatggtcatcttcatgtgccccgcactgtgctgagctgtttacagacgtcatctcatggaatccccacaacaatcctatcattccgtttcacctttggggaagccagagctcaggaccacagcctccaagtgatggctgtgcttgctggtaggagggtgcttatggcagcagagaggccgggggctgaatggagtgtgggggccagaggtggtggggccacaaggatgtgatgtgtgtgtgtgtgtgtgtgtgtgtgtgtgtgtgtgtctccatgtgcctgcgtggatagaaacaagcagagacaagctggctgggcttttgcccttccccagctccgcgcacacctagctttgcaccactctggaggaatggtgacgtcgaatgtccaaggaagaggctaacctgggcacgtcctcttacctgccctccttgaatgacacaagacattggaagtggaagtcacagtcaccggtgctctggagctgggagtggggagaaggaggtgacttttgaggcactctgtgacagcccagttcaacagtagaattatgtttaaggcccaggaaggctctgggtggagagccagcattttgagccgaaggccagtgaacgtggccacccagcagcactgggcagaggtgcggctgcttctgcaggtgtatgtgtgaaggggtgcaagtggacgccttgggcgacttctgcggacaggggcaggagcccggagctgcgtggctctgggattgaagggcaccctggggtggaaggcaggggtcgtgcatcctggtcctggctgctgccaccctgcagggctgctttgagagtcttgctggcctctctggacctggcattacttgtctgttctctgaattgcctcttcctacttctcagcactagattgtcatttaatttttcataaataccctaaggacttacaaagccatagatgggaggggggctccgaggaggccatcccaggcaggtggtgagcaccgttggattgaaaggtcctcccaggtcatcgcctcctggccacccgccttctgcagctctggggctgagtggcatttcccacagggaaagacaggaggaagagcagagccttaaatcaaatcagcccaggattattacttgttatcaattcttgaggaggttcggaggggaagcaggaagtaggctgaagctgttaactctaataagggttagaactcctatgggatttgtcagaaggacttcctggcccccagaccctaaataattgaattggttgttatgggaagagatgaggaggattattaggagatcgtatcactcagccagcagttactgagcattggctctgcgtgagtcctgtcctgggcgccacaaataacaggcagtgagcagaagagggccaccacctcgcggggaagacagaatataccgataacccaaacgaactcagacttgctttctttgtagaggatttattttctttctttttttcctttatttttatttatttattttttttgagacagagtctcactctgtcacccaggctggagtgccgtggcaccatctggcctactgcaacctccacctcctgggttcaagtgattctcctgccacagcctcccgagtagctggaattacaggggcccgccacacacccagctaatttttgtatttttagcagagatagggtttcaccatgttggtctcaaactcctgacctcaggtgatctgcccgccccggcctcccaaagtgctgggattacaggcagaagccactgcacccagccctaatttttgtatttttagtagagacggggcttcaccatgttgaccaggctggtctcgaactcctgacctcaggtgatccacccacctcagcctcccaaagtgctgggattgcaggcgtgagccactgagcctggcccctgcccctttttttttttttgcctgattgactgaacgcgttattgtttgtgaaatgctctttttatctggtatctcttgtcactccacaggggcagccctgtgaactgcgcagggcagctgtgtcttgcccattttacagataaggaagtggcggcacctagagattaggtctggacgcgggacccagatctgcctcctggccccatgcccacctcgttgaatcccgttgcctttccatgggcgactcgtaacggagctgggggtgctggagtctgtgcccgcccctgcatctggtgtgtgatagcttaggagatgtttgttgagtggctgttgcttgcgtacacatgccgtcagctttcgtcgtatcatggcaaggttatacggcccgtctgcaatatgattcctctatgttcggtgggcacataactgtctttcctacagagagatgaggaattttagttccctctgccaaggtggggggattttgtcaaatcgcaggaaacaatggccttggtgcaaagagtagctttaatctgtggctcagctgtttctcagccaggtggccttggatgagactcagaagcctcagttttcccccgtgtcaaagggggccattcatagctactttgacaacctccctgggctgtggggatgaaatgagatcctggccgtgggctcaccgtgtaaaacactgcgcagataatactcagcatgtcccatccatccccaagagctggagactggtgaagccacatgcgcttctctgcccagggctgctggccaccctgacaccctgggcctcagcctctgcccttgatgtccaagaactatgattcctttgtctcaggctgtggagccctgagcttctccaggcggccacttctccaggcggctacggtctctgcctccctcttccaaggatcttggaggtggatgattggatttcatctccatggcaaccagagaggccataacacccgcccatggtggggcctcgagtctgttcccagcagtggaggcagagccggagcaaacaactcctgcaacagcagctgtcccccaggaatgagctgtcccccaggagcgagctgtcccccaggagcgagctgccccccaggagcgagctgccccccaggaatgagctgccccccaggagcgagctgtcccccaggaatgagctgtcccccaggagcgagctgccccccaggagcgagctgtcccccaggaatgagctgtcccccaggagcgagctgccccccaggagtgagctgtcccccaggaatgagctgtcccccaggagcgagctgccccccaggagcgagctgtcccccaggagcgagctgtcccccaggaatgagctgtcccccaggagcgagctgccccccaggagcgagctgtcccccaggaatgagctgtcccccaggagcgagctgccccccaggagcgagctgtcccccaggaatgagctgtcccccaggagcgagctgccccccaggagcgagctgtcccccaggaatgagctgtcccccaggagcgagctgccccccaggagcgagctgccccccaggaatgagctgtcccccaggagcgagctgtccccaggaatgagctgtcccccaggagcgagctgtcccccaggagtgagcttcctcccaggagtgagctgccccacagcctctgcccggcctccagttgccgctttgctgggctaatgaggggctccaggcctcggggtgagggtggcgctgtctgtgctcccagtggctgctacaggccaggccgagggtcctgagtgaatgagacaggggccgacccccacccacccctgcctgtctgtggttcacaatcagagcaaagccctttccgtccgtcttgtcttctcttccccagcgaatcccacagtccccaagactgaggacaagccctgcctcttccgggcagccttccctgtgctggctgaattgatcacgcgcctggctgatggcttcataggctgcttcagagtattttttttttttttttgagatggagtttcgctcttatcgcccaggctggagtgcaatggtgtgatctcagctcactgcaacatccgcctcccgggttcaagcgattctcctgcctcagccccccgagtagctgggattacagacatctgtcaccatacccggctaatttttatatttttagtagagacggggtttctctatgttggccaggctggtctcgaactctcgacttcaggtgatccgcctgcctcggcctcccaaagtgctgggatgacaggcgtgagccactgtgcccagcaagagtcttagttccatttggttgtaaagacgctcacttcagtgtccctgtctgaacctggcggctcttggccttcctatacattagagtcacctggggagcttttaacaggcctgatgcccaggccattccataccaattcagtagcaatccctggggtaggagccagagagcttcccaactccccagggattccagtgtgcagtgaagattggaacagttatcttaggattcaagtcatgaactggccgggcgcagtggctcacacctgtaatcccagcactttgggaggccgaggcaggtggatcacctgaggtcaggagtttgagaccatcctggctaacatggtgaaaccctacctctactaaaaatacaaaattatccgggcgtggtggcgggcacctgtaatcccagctactcaggagactgaggcaggagaattgcttgaaccggggaggtggaggttgcagtgagccaagattgtgccattgtactctagcgtgggagacagagcaagactctgtctccaaaaaaaaaaagaatttaagtcgtaactagtccaccagcctgtgctgaatggaggctgactgatgaacagcagagttagctgacaaagcttgctgtagtcttaactcactgcaaattgccaaagccctggtttgttttttaagggctgggaggtccctaagggttcttggtactcaggaaggagagcaggggaataatgataatagctgccgttttgttagcgccagctttgggtgccttgcatagcatatatttcctcattgtaacctcgcaaaagcttcatgaggtatagatcttgtttttatcctcattttagagatgagaaaactgaggctctgaatggctaagtagcttgcccaaggtcacatggctaaggtcacattcccgaagtgctaatctcaggaatggaacccgagtgtgattccaaagcctctgcccttgaccactgagctgtcctggctccccaacctctgctccatcaatcaaagaatggggggccctgagaaggaggtggcttgtcccgtgggaaagatgctggtttccaggattcctccccttggagccaggccctgactgaggggctcccgatggtattaaatatctcctggatcagctggggtcacctggaccctgaaggtgtctactttcccgttgcctacgacacccactcggcttcagctgagctttcccaaggacccttctgccctgatactgtgcccagttctttaacctacatcatgttatttaatgtcattttcacaaccaccctgtgacatggtatcgttatcctcatcttgtttctttgagacagtctcactctgtcacccaggctggagtgctgtggtgcgatctcagctcactgcaacctctgcctcccagtgcaatagaagactggccgggcgcggtggctcacacttgtcatctcagcactttgggaagccgaggtgggcggatcacttgaggtcaggagttcgagaccagcctggccaacatggtgaaaccccatctctactaaaaatacaaaaattagccgggcatggtggcgggtgcctgtgatcccagctacttgggaggctgagacaggagaattgcttgaacctgggaggcggaggttgcagtgagctgagatcccaccactgcactccagcctgggtgacagattgagacttcgtctccaaaaataaataaatcaataaaataaagtgcagtagaagacagtgtccttattgttgtaggtgaggtggtagattttgtatctgagccaccatccctgctgaaattgccccggacaggctgatctggtacaggtggcacctgggaagtggcagcctcgcttccgctggccagttccctggttcagggttgccggcctcccagatccacacctgtggtccagactctgctgtctggctgcccgttggatcttctgacagggatggccatgagtcttctcagtccagacatgtctccacctggacttagggtctgttcccccggaaccagctcccccttcctgtccatcgctcagccctccaagcccagaggaccctgctgtggccgcattttcagtcaactctcccatcgccagactttgcccttggttcccaccatggtcacctttgacaaagcacggaggggcggtttgccccgttccacatcatctcatgcaccacagtcagcttcgttttcctgaagtcacctctgaaatcaccttgccattttggcatccgtggctcccagcgtgcgtgaaatctgactattcaggatagtgttccaggccctctgcagtctgacccctccagagctcggcttcagtggtaccagtctgttcatcagggccaacctcctgcgtcctgcccccattctgcacgctgataccctgccgcaaatggaccttttccttcctcacgctctgtgactggttgtttcttccatatgaacccctcagggcagcccacacacttcgtgtttggtatttgtatgagtcctacatatgataacattttaagagcaaaggttgtggagttggatgacctgtgtccatctggtttcccacctgactgccgtgaaatcttgggcgagtaacttaactccctgcgctttcatttcctccattgtaaatgagtcataatggtacggaggcagaaatttaaaaacaaatatgtatgtatttactccaagaaaagtaacaggcaaggcaagggttaaaaagaaaaaaaaaacaggccgggcacggtggctcacgcctgtaatcccagcattttgggaggccgaggcgggtggatcacgaggtcaggagatggagaccatcttggctaacacggtgaaaccctgtctctactaaaaatacaaaaaaattagccgggcatgatggcaggcacctgtagtcccagctactcgggaggctgaggcaggagaatggcttgaacccgggaggcggagcttgcagtgagccgagatggcgccactgcactccagcctgggcgacagagcgagactccatctcaaaaaacaaaaaacaaaggaacaaaaaaaacctctttttttttctgcctagcaagctcactttaaggagttataagataacgctgtttaagaagccaaggctaaagaaatgggctccacacacccgccttttagagcaaggttgaaggaaaaaagaaagagaaattcctttactgttactcctttccctggcttcctaagcataactgtgtttacaaatgtctggatttagccagtccttgtttttcttttgacacagctacaagccacaagttatgcactatatgattaactgcttttgttttacttttgtgaagtctgcttataaaaaccccattctgtctttattcaatgctaagctttttaaatgcaaatccactgagctagtgcatacctaaaataaacagtccttcccttctccatatcggtctctccggtcctcagtttcctgcaacagtacaacttagattttaaatttttaagaagtttttcaggcagagtgtggtggctcatgcctataatcccagcactttgggaggccaaagtggaggactctttgaggccaggagttcaagaccagcccggcccacatagcaagaccctgtgtctacaaaaactttttcgaatcagccaggcatggttgtgcatgcctgtggtctcagctacttgggaggctgaggcagggggatcatctgagcccaggagtttgaggctgcaatgagctatgtttgtgccactgcactccagcctgggcaacagagcgagactctgtctctaaaaaaaacaaaaaacaaaaatcaaaaaacaaaaaaaagcttttcaagtgcaccagtcttaagcatagagcttggtgaatatttccatatgtctgcttgtgtaactaacacccagatcaagatatggaacatcttcagtgtcctggaaagttgcttcctgccccttcccagccaacactccctgtccccgtcgtccacccccagaaagccactgccatggacttctatcaccatccatttgtttcgcctgttcttgagctttgtatttaggctggtgcaaaagtagttgagagctggacgtggtgggtcacacctgtaatcccagcactttgggaggctgaggcgggtggatcacctgaggtcaggagcttgagaccaacctggccaacatgctgaaaccccatctctactaaaaaaaaaaaaaaattagccgggtgttggtggtgggcacctgtaatcccagctactcaggaggctgaggcaggagaattgcttgaacccaggaggcggaggttgcagtgagccgaaattgtgccactgctctccagcctgggtgacagagtgagaccccgtctcaaaaaaaaaaaaaaagtaattgtggtttttaccattatatattacctttgctccaacctaaagtaaatagcctcctgcggtgcaggcatacctcgctttacggcactcctgtgatgcgggcgtaccttgctttacggcactcatgtgcaggcgtacctcgctttacggcacctccatgcttagttgagcttcaaagatgctgcgttttttttcaccagttggaagtgtgtggccacctcgcattctctctgtgttacgtgttggtggttctcacgatctttcagacttttttattgttatgacacctgttacagtgatctgtgatcagcgatcctccatgttagcattgtcattgttttgggcaccacagaccggacccggcaaccttcatctatgaacgttgtgtgttctggctgttccgcccaccagcctttcccagcctctctcctctccccgctccagcctccctattccctgagacacaaaaatatccaagttagtccagtgagtaaccctacagtggcctcgaggtgtgcgtctgtcactttaaatcaaaagctagaaatggttcagtttagcccgggctcggtggctcacgcctgtaatcccagcactttgggaggccgaggcgggcagatcacgaggtcaggagttcaagaccagcctggccaacatggtgaaaccccatcgctactaaaaatagagaaattagccgggcgtggtggcgggcgcctgtaattccagctactcaggagtctgaggtgggagactcacttgaacctgggaggcagaggttgcagtgagctgagattgtgccgctgcactccagcctgggtgatagagactgtctagaaaagaaagaaagagggagagagagaaggaagagagaaagagagagagagagagaaaaaagaaatgatttagtgtagtgaggaaggcttgttgaaagccaagataggctggaagcggagcctctcctaccagttagccaaattgtgaacacacaggaaaagtgttttaaggaaattcaaagtgcttctccagtgaacacaagaatgataagggaaacagccccactgctgatatggagaaagtttgagtggtcggataaagatcaaaccagccacaacgttcccctgagccggagcccaatccagagcaaggccctcgcactctgcaagtctgtgaaggctgagagaggtgaggaagctgcagaggaaagtttgaagctggcagagatttgttcatgaggggtcaggaaagaagccgctttcataacagaaaaaggcaaagtgaagcagcaagtacggatggagaagctgcggccagttgtgcagaagatgtagcaaagactgtaaaggaaggtcaccgcactaaacatcagatttttggccaggcgcggtggctcacgcctgtaatcccagcactgtgggaggccgaggtgggtggatcacttgaggtcaggagttcaagatcagcctggcctacatggtgaaaccctgtctttactaaaaatacaaaaatcagccaggcctggtggtgcacatctgtaatcccagctactcaggaggctgaggcaagagaatcacttgaacctgggaggtggagcttgcagtgagctgagatcgcgccattgcactccagcctgggcaacagagccagactctatttcaaacaacaacaacaaaaccaaacaaaacaaaaacaaaacagatcagattttcaatgtagacaaaacagccttctattggaagaagacatatgtaggactttcatcctagaaaagggatccgtgcctggcttcgaagtttcaaaggacagaaggacaggctgactctagtgttaggggccagtgcaggggtgactttaaaccagtgctcactgaccattctgaatatcccagggactttaggagtaatgctcaaacaatggtattcttcacagaaatagaaaaaaaaaaatgctaaaatttatatggaaccaaaacaaaaataacaaaactggaagaatcacattacctgactttatttgtttattttttttgagacagagccttgctctgtcacccaggctggagtgcagtggcccaatcttgcctcactgcaacctccgcctcccgggttcaagtgaatctcctgcctcagccccccgaatagctgggattacaggcacctgccaccaagcccagctgatttttgtatttttagtagagacaggctttcaccatgttgaccaggctggtctcaaactcctgacctccggtgatctgcctgctccagcctcccacagtgctgggattacaggtgtgagacaccgcacctggcctctctgaagacttttgatgcagctttggtggaataatggtcagggctgggctccctcagctgctcttccctctctcattcccatcctcaattcttgggcagaaaataagtttatcacttaacagtcagcctctgtatcacccttgcgacaggctggagggtgtcgctccagcctgggcaacaagagtgaaactctgtctcaaaaaaaaaaaaaaaagacaaaaagaaaaagaataaaaaataaagttagcaatattcagcaatgatgtggccggcaagagcctgcagaggatcatgggccaggtcacccatcctcactgagtcctgcacggctctcggctcagctcacgaggctctcaggagcaagtccctgcctcctctccagcacggccctctccccctctgctcactctgtgttctagccctcctggctatttatagtcccctccaggggccctgctgtttcccactgggtgccactgccaagcctcctctcaccgcctgaaactctgctcctgtcccccacccgcctggcaggcacccacacagctttcaagatccaattaataacagtaataatagcagctgagatggattgggtgcttcctatgtgctaagtgccgtatgcgtgtcatccagtttaacccccgcagcggcccgtgcacttgatcctgtgtcgtcccccgtttcacacggatttgctaaacccgtatccatttagtagcagccaccctgtgccaggcactcctcggaggcacagagaggttaggaagtgccagagcgtgggctggaacctccgctgccggaccgcagggtccctgctctcagccacagcgatgaactgtcttccttagcgtggcaccaaagcctccccagccacctcccctccccgagtgttgcccacaccctccggtccgccttgccgggcctttgaggcctctgtcgtagcatctcggagatttgattgctgattggactcgcttcctctctgggctgtgaggatatcatttggaaatgtgttcattgtaagcagcagaaaacccaatatatagggacttgtatttcccatgagcaggaaatgagacaggctcttcctagtgtggctcagctgaacagcatgagggaaatggctctgttcttttatttatttaatttaatttaattaattaatttttatttttttgagagggagtcttgctctgttgccccggctggagtgcagtgctacaatctcagctcactgcaacctctgcctcctgggttcaagtgatctcctgcctcagcctcctgcgtagctgggattacaggtgtgtgcaaccatacctggctaatttttgtatttttagtacagacggggtttcatcatgttgagcaggctggtctcaaacttctgacctcaggtgatccacctgcctcagcctcccaaagtgctgggattacaggcgtgagtcaccacccggctaatttttgtagtttctgtagagatggggtttcaccatcttgcccaggctggtctcgaactcctgacctcaggtgatctgcccgccttggcctcccaaattgctgggatgacaggcatgagccacgcgcccggcctctgttctttcttgacctgttcctggtggcagcagtaaagccaccgtaactccaatcatcacccatgagttcaaggcaaaatgtctctttgtaatcatcaaagtcagggccttgccagaggtcccagcatgcttcacttgggtctcagtggccagaatggtgtagggcagccgttcctggtaatgagagaggcagagaaagcgggtatcttgcctgggactggtctgttgccacttcctagaaaacgagggtagagtaagcaaggaagaagggaagacgggtgtcgggtgtctgccagtgccctagagcgcagagaccgtacattaattttttcaaaatttccagaatcggaaggctctaatgattttgtgttgtagccttccagtcttttttctatgcacgtatgtttttacttttttcagacattgtaacatactttaattattgttattaatctctttttgcacttgataagatgctattcatcatccatatagtttttaatgctatatagcagcccatcttgtagaaaaaccataattgactcaaccagtctcataattcaggttgtttttaatatttcacacttacagacagccctgtgacttacaactttatttttatgttcatttataactagtatcatagatcataatcttattacgctgggtataaactgtaccaaccactaaaccttttgataccagttaccagattgactctagaaaagttgggccaactttttttttttttttcgagacggagttttgctcttgctgccaaggctggagagcaatgttgtgatcttggctcaccgcaacctccacctcccaggttcaagcgattatcctgcctcagccttcccaagtagctgggattataggcatgtgctaccacgcctggctaattttgtattttagtagagatggggtttctccgtgtgggtcagcctggtctcgaactcctgacctcaggtgatccgtccacttcggcctcccaaagacctggggttacaggcgtgagccactgtgcccagccaaagttgtgccagttataggcagcctccaagagtttctgtgagtacctatgccctgacagctctggatattgttattattatcttaaaatccttgccaatttgacacgaacagtgaaaactatatagaactttacattttctttcattacaaatgaggttaacattctttttaatgcattttgaatatttgtagttctcttttaaattttctgttcatttcccttacacatttagaaagttgaggttttcatcttttctcattggcttgtaaaagtgctttattggccaggtgtggtggctcacgcctgtaatcccagcactttgggaggccgaggtgggtggatcacaaggtcaggagttggagaccatcccggctaacacggtgaaaccccgtctttactaaaaatacaacaattagccaggcatggtggtgcatgcctataatcccagctactcgggaggctgagacgggagaatcgcttgaacctggcaggtggaggttgcagtgagctgagatcgtgccaatgcattccagcctgggtgacagagcgagactccatctcaaaaaaaaaaaaaaaaaaagtgctttcggtattcaagtattatcataatatgtagaatacaggaaagttcctgggagagggcacagatgaggcagatttgagggcaaaacaggatttcaccaggtggacaaggggtaaggagaggtatatatatatgtgtatgtgtgtgtgtgcgtgtctttgtgtgtgtgtgtgttcatagagacagagtctccttatgttggccaggctggtctcaaactcctgggctcaagtgatcctcctgccttggaggatgccccacatcatagtgatgggatgacaggcgtgagccaccgcgcccagcaaggagggttttctaggcacgggagcagtgtgtgcaaagaggggggagctgtgtgcgtggcaggcactgcatttggtgtgcaaagaggggggagctgtgcgcgtggcaggcactgcatttggtgtgcaaagaggggggagctgtgcgcgtggcaggcactgcatttggtgtgcaaagaggggggagctgtgcgcgtggcaggcactgcatttggtgtgcaaagggggggagctgtgcgcgtggcaggcactgcatttggtgtgcaaagggggggagctgtgcgcgtggcaggcactgcatttggtgtgcaaagaggggggagctctgcgcgtggcaggcactgcatttggtgtgcaaaggggggagctgtgcgcgtggcaggcactgcatttggtgtgcaaagggggagctgtgtgcgtgtcaggcactgcatttggtgtgcaaaggggggagctgtgtgcgtgtcaggcactgcatttggtgtgcaaaggggggagctgtgtgcgtggcaggcactgcatttggtgtgcaaagagggggagctgtgcgcgtggcaggcactgcatttggtgtgcaaaggggggagctgtgcgcgtggcaggcactgcatttggtgtgcaaagaggggggagctgtgcgcgtggcaggcactgcatttggtgtgcaaaggggggagctgtgtgcgtgtcaggcactgcatttggtgtgcaaaggggggagctgtgtgcgtgtcaggcactgcatttggtgtgcaaaggggggagctgtgtgcgtggcaggcactgcatttggtgtgcaaaggggggagctgtgtgcgtggcaggcactgcatttggtgtgcaaagaggggggagctgtgtgcgtggcaggcactgcatttggtgtgcaaaggggggagctgtgcgcgtggcaggcactgcatttggtgtgcaaagaggggggagctgtgcgcgtggcaggcactgcatttggtgtgcaaaggggcgagctgtgtgcgtggcaggcactgcatttggtgtgcaaaggggagagctgtgtgcgtgtcaggcgctgcatttgtggcttaatgctgccattagagattgccatgaacttgatggcttagaacagcagaaatcgatgctctcgcagtctgaagaccagaagtctgaaatcaaagtcccagcccctccccaggctgccggggcagagttcccacttactcccctctttcagtgtctggtggctccaggcattccttggttggtggcagccccagtccaaaccttgcctctgtcttctcttctgtctgtgttttccccctttctctttccatagggacacagcattggatttaggacccaccggttaatcgacaatgatctcatcttgagacccttcatttattcacatctacaaagaatgttttccaaataaggtcacattcccaggtcccaggaattagaatctggacataccttgtgggggggccactactgaacccaccgcagggagctagaaggagtccgatgtcacagggcaggagaataggaccctggagaggtggagcaggtgcagaccacaaagggccttgagctgaggagcggggctgtgtccctaagtgaatggggggcaacacggtctgatttgtgacccggctgctgtggggagggtgctggaattgtccttgtaagagttggtgagggtggggaggagcggggatgcctcacagtgcaggagatgaggggcgggaatgtggaggcatctagaatggctcccaggttccctacgtgtgtggtctttgggaaaaggctgcgtttgaggctcctaaaggtggagatgcccaggagtctgcagacctgacttcttccgggagcaggaacacaattcgggagaggaaggtgatgcgaggttgatggaagctggcgagtaccagtccctgccaccaccaccattttatcatgaacaattgtaagcacacagaaaagttgaaagaattcacagtgaacacccattcacctgctgtctaacgttcccagtgatgatttttatgcgcttgctttatcacacagctgtccatctttccatccctctgaacatcatcattccatcttggtttttttgttgttggttggttggttgtttcgagacagagtctcactctgtcacccaggctggcgtgcaatggtgcaatctcagctcatcacaacccccacctcccgggttcaagcagttctcctgcctcagcctcccaagttgctgggattacaggcacccgccatcgcacccagctaatttttgtatttttagtagagagggggtttcaccatgttggccaggctgttcttgaactcctaacctcgtgatccacctgcctcggcctcccaaagtgctgggattacaggtgtgagccaccgcgttcagcccatcttattttttatgtatttcggagtaagttgcagagagttgtacacttcactccagcatgtcactcactggagcccaacatttgctgaagtgcatgaatctttttttgttcttgtttttgtttttgtttttttgagacggagtcttgatctgtcgcccagtctggagtgcagtgtcgcgatctcagctcactgcaagccccgcctcctgggtccacaccattcttctgcctcagcctcctaagtagctgggacaacaggcgccaaccaccacgcctggctaatttttttgtagccagtatggcttcaccatattggccagtatggtcttgatctcctgacctcagatgatccgcccgcctcggcctcccacagtgctgggattacaggcgtgagcccctgtgcctggccctgtcatctaggttttaagcccctcgtgcattaggtatttgtcctaatgctctccctccccttgccctccaccctccaacaggccccagtgtgtgacgttcccctccatgggaacagcaatttttaagggatgggtagagaaagaagatttcaccaaggagcctgagaaggacggtgacagtcagaggaaaagcaccgaagcggggacgtcagggaagatcacctgggtcagttaccttaggtttgactgcagataatagaaaaaccaagtaacagaggctcaaattgcatttggcactttttctttcttttatgtaaaaacgccccgaggtagaccttcctggggtgggctccactgtgccctcagtgacctggactcccagcttgtgaaaacgtcccgaggtagaccttcctggggtgggctccactgtgccctcagtgacctggactcccagcttgtgaaaacgtcccgaggtagaccttcctggggtgggctccactgtgccctcagtgacctggactcccagctttctgctcagctgtcttcagtggtggcttctatcctcagctcacctcatggttcaggatggctgctggggctccagccatcccatcaactctccaaaccagcaacagaaggaggaacaagggcagtgtggatagtgtacctttcggctaaatcagtctcttccagcagcttcctgcaagttccacacatatccctgtaacatcttgttgtctagaacgtaatcatatggctcacaccatcaggaaaggtgtctttgaactagctgctgggtgcactgccgctccgaatacagtaggatttctgttagtcggcggggaaatggatattggctgccagcagcctttgccttgtctgccttttcttcttttttgagatctggtgcccaagccgctgtctgctcagcatacccacctgtggccgtcggagactgaagcctgtgctcagtaggtccccatcttcctcccccagggttcctgccttctccgaggattggtttccccatcttttctgtaccccttttcctggttggagtctcctgggctctcatggttttgtgggggcagaaatgaaaggggaaggccctggaaatgttcgcaggccgagccctttcgccgcccctgggcctccgcccaccagcaccctgtcctcaggccccctgcgttcagctccatggtcagccccccttaaccaggagggatatggaaggggacttctttggagtgagattcagagggaaagggagggcatttgagacctgggttctgatcctgtgatcttcggcaattgtatgtaaattgggaaaaataagaactgcctccccgcggaacatccaggctggaaggagcaggggatggcagggcccgtggtcctctgctctgatcaggatgaactgtgcatgtggggagactggcagagaccttccctaccgtcccttcccccccgttgatcttggacgatctcccaagtgtgtggggtccattcctgcgacccctgggaattggtcagtgtacaggagagtctgcttggccggctggaatctaaactgtgggcaaagccgcggtccactattgcttattttccctggactccaggcaccaacagggcagcctggagcctcctggagaggaggagggaggagggaggggccggcgggaggctgccttccatcccctcctgtgcttctccagagtgagggggtgtcaccaaacggccaggcccttcacggacccagactcaggccagctgggtgccgctgtgcctcttcctcctccccctggaaggaccagagtcatttcacatcccttcagccacagacacaagtgtcatggtctccagggcactgggccttatgtcctaggtgcgtggcctacacacatctcagtgggagggcatcctgggtcctgcccaggtacgtggcgtacacgcgtctcagtgatggggcatccctgggtcctgcccgggtgtgtggtgtacactcatctcagtgatggggcatccctgggtcctgtggttcttcatacacaaccctgtctagggaaaaaactagtccatgtcccctggcagctgaatggggcattggctcagggacgaggagaggcagccgacagaagcaggtgcagcgagcctaggggaagcgctcggctgccaaaaggccagattgggcagagtgtggccacggccaggcgtcccggtgacctgttgacaccattctccagctgctggttgcctgtgggctggtgtgttgtgacagaggagggaagagctggggcccccgtggagaacttggctggctgggacttggctgaagcctcagacctgagacagacggtgcgatcctctgctcattcattcgctccacgcactttccccgagagcctgccacaggtggggttgtgggtgctggcgtacagtgatgactcagatgctcacctcctgccccaggggctcaaggacaaaggggcaggattcactaaggtgccagggggccaggtgccatggggagggtgacctggaggaaaggatgtctgggcagatggcagggcaggctcagccagcctcccccatcacactgtgcgagatccgaagatgcctggccagggagtcccgcccggaagatacccggggaggtttaacaagcggacgccgccactgggcagtccagtgcgtaggaggctcctgctggccccaaggctgccggcacggtgatcttcgtgtctccaggacgccctgcggtgccagctcccgctggcccgcacgagtgctgaagcttacccctgctctgcgatgagtgtgagaggggtgtccaccccccgctggcggccccagcccaaggaggtccaccacagccctcgggagcaacactgccacgttctccgttgccagtcgtggtgggtcagagctggggagcaaacaggccaaggggcaggggccggtttgtgggagggtccctcctatagccatgctggtggggctggacgcaggggcctttccgaggccgccctcgtaacccttttggaaaatgtgaagccctgagctgctgacctgcacaccccgctcgctgcactggctcagcctcccctcccaaggtgggtgggctccgtgcctgggctctggagcccaagtggtgctggcagccctggggggttaatgcggctcaacttcccggtcgcctttccttccctcctcctttgaaggaagcccacactggggtgatagaaataagcaccggctccgaggagtctgctgtgagcccctgtccctgccaggcctgggcacagcctcctcgcccacgccctgctgccttgggctccgtcctccgtgcggggccttgttctgagggctgagggctcccctcccacactccagaacctgccctggacccctggagggagtgggctcagtacaaatggtacccaaggaggagggccacaggaagtgacatcgaccggccccccccacctccttattccctataaaaagcaaaatggtgactcagagaggagagttggaagcgtcctgcctcttgctcccactgttaatttttacacttggaattaggcagaaggcaaagaaaacagcagcttgaaatacgcggctgacatgctcttcatcgggtagcaacagcagagccgctcctccccgcctcccagcagccccggagcgggcagggcccggtgcctgctggctctcccccgcccctcaccaggcccaggcccccgcacagcccccgcccgggccaggcgtggatggtgcggccggggccatggctgccgggggccgccgccggcgcccactacgctaccagtccctggcagctctggtggaggattctcagtggcctttcttgttccttgtctcagacttcagctacgggacggacgagtacgacggagaggggaatgaggagcagaaggggcccccggagggctcagagaccatgccgtacatcgatgagtcgcccaccatgtccccgcagctcagcgcccgcagccagggcgggggggatggcgtctccccgactccacctgagggactggctcctggggtaggtacaccggcttttctttctgggtttggggaggggtgacgggaaggcctgggcatcgtgggccaggccctgcttgggttggtctcgagagattgggactggagacgtttggacctggccgttcttggtgcctcgtcatctcgtcctggccctggacccctctcaggctcgggcttccctccccacctgctttgccaacgctgccgcccctgtctctccccgtctactagccgtctgctccccaggcctcccagacccctccgtgcctctttcagctttcccctgttagcctgtctcctccagaggacccaggagaggaccaggctctcctcccctctgcacccaggccaggcagtggctgcatgcgtggcccgtgggctccaggtgttcagatgctgctcccgcaaagccagcctgggcctggtgctccctgtgggtgcaatgagctgcccgctccagccctcctctgttcactctggaagggaacaaactctgatggcatccacctctccttgttgacagagacaagagttctgctccagagagaagcattgtagaaggaatattaagtatgtgctctgagacaggccagggatagaaactgtggagggtttgcggtccttgtcattaacgtgttcctggcgacagggactgacgctgtctgagcgcagctcgtgtgtgcctgtcggagacacatgaacgagcaaaacagaggttctgggggttgtttgcctggagctggtgggggagaagaatccaagccggtcctctgtggggggtgtgtgttgcaggaggcggtgggagtgccccatccttgcttggtcctgctcgtccgggtgtgttttgtagggggtctccgtcctgccttctgacgtccccagaggagcagtcgctgagatgccacgggctgcctcttcttcctccaggggctagtgcccccccaccccagctgaggccgcctgaaccctcccattcttgagaaccccctgctccttccagcccccccggccaccctccaccccccacagagctctcacccctcttcacacaccggggtggctgttatagcctttggcaacaagggccttggcaacgggcttcccacttgggggaagccacattgctgccatggcaacagaggccgaggccgagtttagcggcagtccaggcgtgcacctgtgggaagggctggcggggggcaggtgggaggcaagggggccggcgagggggttggtcagtgtgttgttgacctgccctaagacgggaggcgggttagagacaagcgtctcggacctgcgggggcagggtttttgccctggttctcctggaggcattgggctcagggtacaaatagtaacccaaggaggcagagcaggtgttcagggacctgaacgggggccaaccaggggagagcaaggaggagaagactctcgctcccatctctgccttcagctctcaaaccacagcagggctcagagccccgcccggggggactcagctctcaccccactgtgagcagctgcaggaagatgctgcggaatcccggtgtggggccagggtctttgccgctgcctgtccccgcgccacctccctctttgctccctgtccctgtgccctgtccttgtcgcgtgaccaccatgactggtttccgtgtccgtcgattttccgattcctttggtgctggcaggtgccttctctcgggagacagatcacgggcgtcacgcacagatgcccccgcctggcgctccggggcttcggggcagaacttgacttggtggctgtgcgtcttgcttggtggctcacgagggactcacttggcttgaggaccttgaaatccagagatgctagagtgactgccccctaaagtgcttgtggcccccagggttgatgtttacaccatcgactagaagccacgcaaggcaggagtagggagcacttgtccagcctggggatcgtccgggcaaaggtcccatccgcggcacctgccttccctcctcagggagcgtttctgccctttctgctgggtcaccggccccacctagtggactctgcagggattgctgtttacacggggtgcctggagggagctgacgcctcttcctgagtacttggggatgttttggttaaaaacactattaataaaagaccgaggtttctgcggcttggctgtgcttatttggccaaacaggtcccctcccctaccaggcttcctgctggggccttgggaacaggggggacttctggaccaaatcagacaattgttgtagatattcagatatctggcttctggcaccgccttatcgctgggccttccacgcccaaatatgcagccaacgggaagcccaaggttgagtctttgtgttagtcagtgttctctagagaaacaaaaccaacagggtgtgtgcgttatctgtatctatatctacatacgaagaaaagtattagaaggaattgattcaggtgattatggaggcttagaggtcctaatctctgcagtcaatagctggagacccaggacagccaatattggttccagtccaagtccaaaggcctgagagctaggagagccagggatgtaaattccagctcataagccagtggactcgaggctcaggaagagccagtgtttcagtccgagtctggaggctggaggaggccaacatcccagctcacgctcaggtagtcaggcgagaggagcttcctcttattctgcctttttgttaattcaggtgttcagtggattggatgaggcccacctacactggggaggagtctttttactcagtccaccaatacacatatcaacctcatcccaaatgcctcacaaatatgtccggattaatgtttggacaagtatctggacaccttgtggcctagtcaggttggcctagaaaatgaagtgtcatactattattccttcagccacccaggatggaaagcagataagctttgcgcagatgaaaatctattactctcaggctgggcgcggtggctcacgcctggaatcccagcactctgggagactgaggcagccagattacctgaggtcaggagtttgagactagcctggccaacatggtgaaaccctgtctctactaaaaatacaaaaattagccgggcgtggtggcacatgcctgtaatcccagctactcaggaggctgaggcgggagaatcacttgaacctgggaggtggaagttgcagcgagccgagatcttgccactgcgctccagcctgggtgacaaagcgagactccatctcaagaaaataaaagaaaatctactctttagctgtgagacattgggcaagtgtcctcataccgctgagcctcagtctccttgtctctagatagctctaactcccctgaaaggtagtggggaggaggccccactgtgagcagctctcagaccacagcagggctcagagccctgccttggggactcagctcccatcccactgtgagcagctctcagaccacagcaaggctcagagccctgcctgggggactcagctcccatcccactgtgagcagctctcagaccacagcagggctcagagccctgccttggggactcagctcccatcccactgtgagcagctctcagaccacagcagggctcagagccctgcctggggggactcagctcccatcccactgtgagcagctgcaggaagatgctgcggaatttcagcatgaggggaggcctgcagcattaggcctggctcaccaaagtgcacagcccttggccaccagggcccacaagacttttctcgccaggtttagagggctggggagccaacagcattaccactgcaaagaccaagtctgatcaatatctgctgcaccatgaccgaacctgcttttgcaatcaacctcctttctgccacatggggtggccccgggtgaagccgggtctctgcggtgttggcaggacatgctcctctctccccagcacgcccttccacagccttgcactctgcctttgtcttcttttgtgtccccaagacatggatcccacagaggtattagggtgaaacctgaagccctgccccataaaccctgcccaagtccaggctgagcagggcagcacggcagggccaggcccacagaccacgggtggctccattcagcggagactgcccagtttcactctgagaagaaagggccaggactcatctcagctgacaagtgggggtgtaggttcctaaggcaggaccatggtcttacagaaaacccgcctccccacaggccacagactcctctgtctgcttgcctcttgggaagcttagtaaaaaggggctacaaggcagagagaagaactgggttttgtccccactctaccactgtctcactgtgtggcctgaggggtgtcactcatgactccccaccagagctgcagtttgctcatctgtagtgtgaagacactgagaatttcctccctcctgacctcacagggctcaaacctcacagctgttgtgaggtttctgtgagatggtgtttggcagaatgctttgtcaatgtaaaatcgaaacaggggattagactccagcctgcaggagaacccaaagataagggtggaggcgaattgaaatcctcaccattggccgggtgcggtggctcacgcctgtcatcccagcactttgggaggccgaggtgggtggatcacctgagatcagtagttcaagaccatcctggccagcatggtgaaaccccgtctctactaaaaacatacacaaaaaattagctgggtgtggtggcaggtgcctataatcccagctacttgggagactgaggcaggagaattgctagaacccagtgggggcagaggttgcagtgagctgagatcacgccattgcactccagcagccagggggacagagtgagatgccatctcaaaagaaaaagaaaaaaaggaaaaaaaaaatcatcatcattgtccctatcatcctcttcctcctcctccccctcatcacagctgcttagagaggcttgtgctgaacctttcacgtgttggtttcatttaagagccccaacaactctatgaggtaggtgctataaccatctccacattacaggtgcgaaaactggggctcggagaggtgacgtaatttgcctaagattagctgggcatggtagttcactcccataatcccatctacaaggggaactgaggcaggaggatcgcttgagcccaggagttggaggctgagaggtgctaggatcacgcctgcgaataggcattgtaccccgcctgggtgacagagcaagactccatctcttaataatagctattaatattattgtttgtccaagaccatgcagccagtggggcagcgtgttattgaaacttgggtttctatgatgccagagcctgcacagcgctgtcaggtcccgctcacacgccctcccttgtgaagctttcacacccaccccgccgctgatcctactgcagtttgggaggtgtgcacggtcacttgtggggtgcatccgccctgtgagatcaggaccttaatccctgatcatctctgtggaccccagtggaagcttcttggcacctaggggttctcaactggtatttgtggaatggaaccaagtagttctgggatgttcagtcaggaggaagggaggagcaaggaaggctcaggcaataacgctgggaagaactcaggctcagggataacgctgggaggaactcaggctcagggataacgctgggaagaactcaggctcagggataacgctgggaggaactcaggctcagggataacgctgggaggaactcaggctcagggataacgctgggaggaactcaggctcagggataacgctgggaggaactcaggctcagggataacgctggggaggaactcaggctcagggataaagctggggaggaactcaggctcagggataacgctgggaggaactcaggctcagggataacgctgggaggaactcaggctcagggataacgctgggaggaactcaggctcagggataacgctgggagaactcaggctcagggataacgctgggagaactcaggctcagggataacgctgggaggaactcaggctcagggataacgctgggaggactcaggctcagggataacgctgggaggaactcaggctcagggataacgctgggaggaactcaggctcagggataacgctggggggaactcaggctcagggataacgctggggaggactcaggctcagggataacgctggggaggactcaggctcagggataacgctgggaagaactcaggctcagggataacgctgggaggaactcaggctcagggataacgctgggagaactcaggctcagggataacgctgggagaactcaggctcagggataacgctgggaggaactcaggctcagggataacgctgggaggactcaggctcagggataacgctgggaggaactcaggctcagggataacgctgggaggaactcaggctcagggataacgctggggggaactcaggctcagggataacgctggggaggactcaggctcagggataacgctggggaggactcaggctcagggataacgctgggaagaactcaggctcagggataacgctgggaggaactcaggctcagcgataacgctggggagaactcaggctcagggataacgctgggaggaactcaggctcagggataacgctgggaggaactcaggctcagggataacgctgggaggaactcaggctcagggttaacgctgggaggactcaggctcagggataacgctgggaggaactcaggctcagggataacgctgggaggaactcaggctcagggataatgctgggaggactcaggctcagggataacgctggggagaactcaggctcagggataacgctggggaggactcaggctcagggataacgctgggaggaactcaggctcagggttaacgctggggagaactcaggctcagggataacgctggggaggaactcaggctcagggataacgctgggaggaactcaggctcagggataacgctggggggaactcaggctcagggataacgctggggaggactcaggctcagggataacgctgggaaggactcaggctcagggataacgctgggaggaactcaggctcagcgataacgctggggagaactcaggctcagggataacgctgggaggaactcaggctcagggataacgctggggagaactcaggctcagggataacgctgggaggaactcaggctcagggataacgctgggaggaactcaggctcagggttaacgctgggagggactcaggctcaggcaataacgctgggagggactcaggctcagggataacgctgggaggactcaggctcagggataacgctggggagaactcaggctcagggataacgctgggaggaactcaggctcagggttaacgctggggagaactcaggctcagggataacgctggggaggaactcgggctcagggataacgctgggaggaactcgggctcagggataacgctgggaggaactcgggctcagggataacgctgggaggaactcgggctcagggataatgctgggaggaactcgggctcagggataacgctgggaggaactcgggttcagggataatgctgggaggaactccggctcagggataacgctggggaggactcaggctcagggataacgctgggaggaactcaggctcagggataacgctgggaggaactcaggctcagggataacgctgggaggaactcaggctcagggataacgctgggaggaactcaggctcagggataacgctgggaggaactcaggctcagggataacgctggggaggactcaggctcagggataacgctgggaggaactcaggctcagggataacgctggggaggaactcaggctcagggataacgctgggaggaactcaggctcagggataacgctgggaggaactcaggctcagggataacgctgggaggaactcaggctcagggataacgctgggaggaactcaggctcagggataacgctgggaggaactcaggctcagggataacgctgggaggaactgcagcctcttcttccctttcttggtctcttcagaaggcttagggcttgggattcgaggttgctggtaggtgcgtgaagaggcggcatggcagccaggaactcctgagatggtgcctgctccactccctcctgactgctccggacctgggttgtgtggttcagggactcctcgagtttcagcctccgccccccagcagccggcccctgcatttctccccttcctggatcttgggtccctgctgcaaagagaaggacacgagctggaccctcccgtgtgccaggtgctgtgctaggagcccaggggctgccctgccacccaagtcctccagccatggggctgcccccgtttagtagatgaagacactgaggctcagggtggctcctgggcttgtcccagttgggaaggaggtaagtcggaagtaggtagactagtgccttggttgtgaccctgggtcccgtcatcgctggctcccgtcctctctggccctcctacattcacacctggctgggatcttgctcacctctgcatactgttaatcttccctgatgaaccacacctggctggcctggctcatcccacagctctcacgccctgtctgggatctccgtcttctggctagctagcagccctagagttgatgccgtaattacccccattctatagatgaggaaacggaggcacagggagactagatgacatgcccaggtcacacagttggcaagaggcagagctggggctcacatccagagtgcaggggagttttctttctgttttagtttatttgtttcactgtataaacagtgttgtgtaccggcttctcctcaacattagctttattttattttatgtaatttatttatttgagatggcgtctccctctgtcacccaggctggagtccagtggcgcaatctcggctcattgcagcctccgcctcctgggttcaagtgattctcctgcctcagcctcccaagtagctgggattacaggccaccacatccggctaattttgtatttttagtagagatggggtttcatcatgttggccaggctggtcttgaactcccaacctcaggtgatccgcccgcctcggcctcccaaagtgctgggattacaggcgtgagccacctcgcccagcctatgtattttatttttttgagacagagtctccttctgtcacccaggctggagtgcagtggtgtgatctcggctcactgcagcttccgcctcccggggttcaagtgattcttctgcctcagcctccctagtagcggggattacaggcacccgccagtacgcctggctaattttttgtatttttagtagagacggggtttcaccacgttggccaggctggtcttgatctcctgacctcaggtgatctgcccgcctcggcctcccaaagtgctgggattacaggcgtgagccactgcatctggccaacattagctttatgtagttgaactatgtatatgattttggagtgacctgtactagaacagagaggaggcagagggaggagcaaggtgatctggaaggtgacgaatccagtcccatctgtggctgcagttagtggctgcaactgccctggcacttgccctttggtgtcagttcccattggctgaagagctactgagcttcatacagtctggaggtggggcttgagtttctgccaggaaagctgggagagccagggagaagccaagaggcgggagaaagtgcttcaagccgaggacctgccgttgttaaaggcctggaagtgagaacgtgccaggccctttgagaggttactgtcaacagtgagatgggtgagtcatcagctggggccccacggctcttgtttgggctggcttggtggcttcctgctgggcatagagtgagcagtgttttagaaagagtcatctgatgtcagcaggagggatgcaggatgaatgtcctgtcacacctgtcctgaaatcctccagcaccttcccttcgcctatggggccccccttccctttgcacagctgtcaaggccttgtgtgacctgacccctggaccccctgcctacctctgtggcctcaggaccaactccgtgctagaattgtgaactctcacgagagagagattttgtcggttttgtaacaaaacttgctcattgcagtctctggtgccgagaactgtgcctggcacacagtaggtgctcagtaaatattagctgaatgaatgcatgaaccagccagactaaactcatgtcattgtgcctcacatagtctctctcctgtctgttccccagccccaccagcatctctaaccactgctttttttttttgagacggagtctctctctgtcacccaggctggagtgcagtggcgcgatctcggctcactgcaacctccgcctcctgggttcaagcgattctcctgcctcagcctcctgagtagctgggactacaggcgtccaccaccacgcctagctaatttttgtatttttagtagagacggggtttcaccgtgttagccaggatggtctcaaactcctgacctcaggtgatctgcctgcctcagcctcccaaagtgctgggattacaggtgtgagccactgcgcccggccataatttttttttttttttttgagacagagtcttgctctgtcgcccagactagagtgcagtggtgtgatctcagctcactgcaaccactgcctcccggattcaaggaattcttgtgcctcatcctccagagtagctgggattacaggcctgtgccacccctcctggttaatttttgtatttttagtagagacagggttttaccacgtagaccaggctggtcacgaactcctgaactcaagtgatctacctgcctcggcctcccaaagtgcgggattaaaggcgtgagccactgcgcccagcctaattttttttttttttttgagacagggtctttctctgtggcccagtctggaacacagtagcacaaacacagttcattgcagcctcaatatcctgacccaagcaatcctcctgcctcagcctcccaagaagccgggaccacaagagcatgccaccacactcagctaattattttttaaaatttttatagagatgaggtcttgccatgttgcccagctggtctcaaactcctgggcttgagtgatcctcctgcctcggcctcccgaactgttgggatttcaggcgtaagccactgcacccggcctatatgtatagtttattcgtggacacaaataaggaaaaatgtataactaactcttagaggctccctctgtcagagggaaccagaggagactttctctttctttattatgtgtgtctacagagttagaattgttagtgatgtaacaggaaaataaagaagttaaaatagaagtgccacgattgggaacgtagagtgggctctgagggcaccagcgggcacatctgacgcagccaacggggagtcacgggaggctccctggaggaggtgacgtttaaagtcgaatctaaaaataagcagtgggccaggtgccgtgtctcacacctgtaatcccagccctttgggaggccgaggcgggtggatcacctgaggtcaggggttcgagaccagcctggccaacatgatgaaaccccatctctactaaaaatacaaaaattagccgggcctggtggcgggttcctgtaatcccagctacttgggaggctgaggcgaaagaatgggttgaaccgaggaggcggaggttgcagtgagctgagatcatgccactgcactccagcctgggtgacagagcgagactccgtctcaaaaaaaaaaaaaaaaaaaaaaaaaatcgcaataggtgtttccatgttatcccttccagaaaagtggcacctcagctgcagagttctgacactgctcccctccccagtacggccttgcccctcccttgacactgccttgggagtcagtcaccaggtcaatctgtccctgagactgtcagctccgcgagggtaggcacggggttccctgtccatggctgcattccgatgctagcacactgcctggtgcacagcaggcggctaacaaatgcttgctgattgggtcaggcggttaacaactgcttgctgattgggtcaggcgttaacaaatgcttgctgattgggtcaggtggttaacaaatgcttgctgattgggtcaggcgttaacaaatgcttgctgattgggtcaggcgttaacaaatgcttgctgattgggtcagggaaggagggaatggagggtgggtgtgggggaagactgtggggagtcaaccattggagactgagatttagacttgatggtgtcagaaatctcagtggctgcgaaagatttcaaacagtagctaggtgtggtgtgtgcttatgcccctcaccctccatgatgctgttcagcccacttctccaagttcatcttctgtcctctagcaagcagcgcttcttaacctgccttccttcctctcttccttccttccttcctccctccctccctccctcaagacagagtctggctctgttgcccaggctggagtgcagtggtgcgatcatagctcattgcagcctccaactcttgagctcaaacgatcctcccacctcagcctcctgagtacctgagatttcaggtgcgccactgcaaccgggttgctgaagctgcttaaccctttcctttcgggccttctcttctttgcctggaaacccttccctatttccagatgctactcagaagccactgtcctgtgaagctttcactctcaggcagcgttagtgccactgtcctccatccccagggtggctggtaaacgagaacactgcctcgtgtgttcacacgtcctcaccccagacggatcgagagcctgagaacggcaagggccccgtctcccagcctcgtatgtgtgccatgccaggccttttctgggtatgaatgaatgaatgaacagacagatggacagacaagatcaggagccaaagtggggaagtacgtgtggtcgtgtgggtgtaagaggctctaaagcttggtggggtggtggctttggcaaaggaaaagaagaaccgaaggacttggtaaaagggatgtgggggttgagggaaggaagactcgtaagatggcggccgcactaacagaagtggaaacccggaaggggaagctgtttcagaaggaggaagggtcctttggtccagatgtgtggagtggaagggccgtggctgggcttccaagtgaggagacccagtggccggggcaggtgctagacctagagcccagcaagacaccagggctgcagctggcagcgggccaccactggcctggaagggagaagggctgcttctctgggggaagggagcagagggctgaggctgggcccaagcaagtgactccacatttacaggaggcgggagaatgaagggccagcctacaccagagagtggtcggggcagtgcctgcatcaacagggcagctgagggcttggagaaactctagactgcagaggccaaagagtcggagagggaggcctctggctttggaataaaccgtttgggggggcctttgaagcaggctgcttctatggagaacattaggagccaggccgaggcagatggagtgtggagctcaggtccagggctggctcagggcatttgtcagggaaggggagggaagctgtggggactggtgagtcacttcccctccaggggggcaccgagggcctgtgagtggagtctgtgtctgatggaggggcactctcattactcactggaatttccagccaccggggacagggtggagtagagaggccctggatactcagggagtcacttgtgtggggttcagggattttgggaagaagtgggcgtcagtctcaccatgccgtgtagaggtgtggggaacggggacgaggatatcctggcagacttccaagggcacctcatgtcctcttgagtggaggaaggaacacagcaggggcctgtggggttttaggcccttcttcgtgtcacctgcaggtctgactcatgtgggcagcccatgccatgcacttggagcccgccgggcgggagacagaagaacccgtggtaccaggccctgagctggcatacttgtgccctggggaatgccaggcctggtcgttcccaagccctcgccacagcctcacccgcccgcaccaaatgaggaattgtggctgaaagggcccttcagatgcgccctggctatttataacccacccaggcagggacaggggaaaaccaggggctggaaggagatgggtggggtgggggtgtgcctctgttgaaccctggtggcacagttccctgatcaaaggctgttagccctggggcccctcaagggctcaccccgcaatcccctgctctgtatttcagctctgcaacaggatggagcctctctccagggagggcagcttctctgctgccaatggaattgcatgagccccacctagagcccagagcttctgaagaattctggggggagtggggggctgtggcctgaactcgggccacaggtgtggttcatttagacggcaccatgttgttttaaaatgttaattatttgccatcgttttaaaatcaggagcattcctgttaataagccagattttagcttattttgaacagagatcaggcagccatgagcttgcgtttcctccagcagccatcggctggagtgagtggtggtttcaccctgccctacctggctcgcttcaccggctggcctcacccgcaggcctcacccgcaccctcatgggtgccgtttgcaacctttgctccatcgttgggttgtaaaagagcttttcccagggcctcctctggactcctcctcccatggaaggaggtgtatgtgcatctgggaactagggccagggggaccagaatgtggcctcactccctgcacagttgggggttctgcaaccattggagaagccaggggaagctggctgggagtgggcagggccggagatggtgcctgtcctgggttctgtgtgcactccccttgcaggatggctccctgcggtggggtggctgggggggctgcttggaggaggtgggggtgctggtctcagcagtgcctgtgagtaggtgggaggctgctcagaggaggtgggggtcctggtctctgcagcgcctgtgagtaggggggctggtctgtgagtgggggggctgctcagaggaggtgggggtgctggtgtcagtagcgtccgtgagtggggggactgctcggaggaggggggctgcttggaggagggggatcctggtccctgtgagtgggacgcccaccgctcctgtgcaggacagtggtggcgccgcgctcctgcctgggggcaggtcaggcctgtctgttgcaaagcctgactcctccagcggcggcgggacgcggctgtggcttctgggcgggccggggcctcccctccggaagggggctccggcgcatggggactccggggtggctctgggggtcgcccctgctcgccgggctcctggctcggccgcgcgcggggaatgaagatgcgtctgggaagcggcctccccgctccaccccaccccggcccggccgcggcctcctcgctcctcctccgccgcagaagcctccgccagccgcggccccgcaaccccagaggacgggcggctccacctcgcgacgcgcgtttcctgtgtgttcggagcgagcgcgagcccgagccccggagcccgggaagggcgggccctgcggggccgggcgggacacggaggagggcgctgggctgctgtgcggcgggttcgcctccgccacgggccgggcacggcgtcaggggctgcccgggccttgctccccctttcgccgggcgaggacgcgcgaggcggcggcggcggcggcggagcgggctggactaggtccgggatgcagtcccgggtcgggagccccaggccgggcgcgcgggtgtagacctgccccccctcccgcccgcctcctccctcctccctcctcccgccgccgctgcgtggaccccgcttcctgtctgccctccgcgggctccggctgccatggaggaggaagaggaggcgataggcttgctggacaaggttctggaggacgaagatgtgtttctcctggaggagtgcgagctgggaaccccgaccagccccggctcagggtcccccttcctggtggctgtgaaggtgggagcgtgacacgccctgggcgctggggggggccgggccggcgctgccgaaggtgcgcgggagaaatggctgatgcgggcgcagagcgcgcggccgggtggaagccctcggcggagggtcccggccccggcagctgttcccgggggagaggggcgggcctgcctccccgaccggtgtcctcggggcagtggtggccgccccctccaggccagcccagctcagggctccggcggctgtgccaggagtcacctggcgcgcctgtcagcccgagcctcgccgcctccctggagcgggtgggcaggaatcccccgtttccacggcaaccgcaagagaggggccaccctcttcccagccaggagacagggacttggtgtctccgagctgaggcaagagggtgtttgcaaagggcaagagccagaggtcactgagcttccttgaaggaaaagcactgggtcagctgaaggggggagggaacagctggcttggaggctgcagccaggtgggcaggtgcccttcccgaggcgggacaggcagggagcatctgctgggccctggcccacccgctctggggctgacggcgttctctgcagcagtgacccgtcctgtaggagaggttggctcccggtggaactggagggcagtggtggccagaatcccttgaggagcggggcggccccggaaccacgccggctctgtgagtctggcccggcacaccacagcggtcttcctttttctctcctggacacacctctcagagcttccacctcagccttttgctcagctgctctctggttctgtgtcgagaagggaggcccagtgaggatgcgtttcggggagtttgcagactgctaggcgaggctgcctaaccgagtgcccatcggcggggcctagaaggcatgtgcagccagcattgctggggacgggaggctgtccctgaacctctctgggcctccctgcccctcacagaagatggggatcacagtcctgccccacccactctacagtgtggctctgaggaggagccaatggaggtaaaaatagatgcagaaccacgggagatggctgatgtgtgagtatgggtggagcggtggctgcaggcctgggtggggagtggagctgtagggaggctggcagtggctggcaccccaccctgtcttctctgatctggtgctggcgtagggccgtgggggtaagtcacgtctccccgtgggctcagggaggcctctgcacttagggtctgaccagcctccccactaggaacagggtgggaaagtctgctcctgagccaggagtcaggctgggagtagcaatgctgggatgggaggtgtgtggccctcatgggcctcctctgggaagcccccagcacagatgtgggcccactcagaggctgcctcctggacctccccttctgctggaccccggcgtatgcctcagctaagcccgtatttcattctgctcagatgctcagaactctagacatttgcctccgcaattatatcccattctcctggaggaccaggaccatgtcatattcattgctgaacactgcacagtgcttggtgtggggctggtgcctgtgagagtctgcacaatgtgtgaggcccgctggggcccacgaagggtgcaccaggttcccagcctcgctccatctcagaggtgtcctgctgtgtacggcggtggcccacggatgccaagagagcctgagcacgtgtcacacctgaaaacgctgctcctcctgggtccccgtgagcaccgggatggtgtcttcccctctactttgctgccagcatgggggaaggagacctttctcgaatgccggggagttccaggctccctgctccatcctgaacacctctagaattcctccctcctctaccggcattggcctcagagggagaagacaagcaggtggccacagagcggtgggaagaaagctcctggattcattcaacaaacactctcaggttaggtgctcttcagagcaccctgcctggcactgtagagatgacaagaggaacaaggcgtgatcttccctcacaaggcgttcagagcaaggggcaggtacagggagtaggaatagagtacggaagtaggcagggtgggccagatgcggtggcacacgcctgtattcccagcactttgggaggctgaggtgggcggatcacctgaggtcaggagttcgagatcagcctgaccaatatagtgaaaccacatctctactaaaaatacaaaaattagccgggcgtagtggtgggcgtctgtaatcccagctactcaggaggctgaggcaggagaatcgcttgaacctgggaggcagaggttgcagcgagccaagatcatgccactgcattccagcctgggcgacagggtgagactcagtctcaaaaaaaaaaaaaaaaaaaagactgtgagaagagtactgataaaagggcaccaaattcaggggagaagggaccacttctagtggagttggggatggcctggatgcgtgcatgtgtgtgtgtgtgcaggccaagggtcatttctggatgatacactcctgtcctgggctgcagaggttcttggcacacccttccctggcagctagtaggaatccaaggcaattctctttgctattactttactttaggggtacttaccttaagcagcagttgcgttgtgagcatgtgcccaagtgccaggcccataaatcaatcctgtttccagtgtcatttccaagacgcttcatcttcctggggggcagaggtaaagttggctgcagttttctccaaagctatagctggagtttgctgcatatctcagcccagacttacctttgaagagttattgatctgtaaaactggtaatgcaaataaaatactgatagcagcgtcatgttgcatttgtaaaatggcttacacttgccaaaaatgtttcatgccattctatttaaagataggtagggttgtgacgggggcgttgtagaaggtgctattttaaggaacttatttgtcaggaataaaaacccttttgtaatgcagattaaccctttaggtatcattctgtgccatttttttttttcttttgagacagagtctcactctgtcacccaggctggagtgcgatggcacaatcatggctctctgtggcctccacctcccagactcaatcagtcctcccacctcagcctccccctcactacaggcacatgccaccacgttgggctaatttttatatttttgtagagacagggtttcaccatgttgcccatgctagtctgtaactcctgggctcaagcaatctgcccctcttggcctcccaaagtgctgggattacaggagtgagccactgagcccagcccaattctgtgccagtttttaatggatcatctgaaacatctctatttctgtttcacctgcccaggtctcttgtgcctgcacatcatgcctgtatcccccatttggatgtttttctaagtgcgggccccacgtggtgatttgagaaatgatcggtggcacctcgatctatattttgcattttaatggttaagtatatattttaatatatattagaaaaaatatgacctgtacatttttcttacgatttcaaatacgtgtagggtaagactgctttttacaagtcagttcttgggcgcagtggctcatgcctgtaatcccagcactttgggagactgggcgcggtggatcatgaggtcaggagttcaagaccagcctggccaacatggtgaaaccctgtctctactaaaaacacaaaaagtatctgggcgtggtggcgtgcacctgtaatcccaactactcaggaggctgaagcaggagaatcacttgaacccgggagatggaggttgcagtgagccaagatcctgccactgcactccagcctgggtgacacagtgagactctgtctcaaaaaaaaaaaaaaaaaaaaaaagttactgtaaagaacaatattgagtaaagaatagtgcaggtggtggtatgtgagtatggcaaaattttaagggtgggatatgaacaaccaaagtttcaaaacattgcctgtgccctatggtgcctgcctaagacctcagacagcaatagggagcccagaatacggggatccacccttcaggagagaggggccactggaatttggtctttgtcccccagcagttgacccgtcttctctgttctaaattctgccaaggaagcagctgaaagagacttcctcagcgcctagcgctgggagaggagagggtctctcgatgcctctacactgcctcagctgtcctgagactgagatgggccagttgtcctgaggttgatgcttggtgtgggtataagccccaggcacggccacccccacccccaggcccagtggcatctactctgagcagatcctgctgggtactcctggcagccagctgtggcccgtgaactgacttctaccgtctgtgaagcctcagaccctcgctgcatgccctatagccttgagtcgcagccagagagccagccctgcttgttgtcttggaggccagtgctactggagagattgtgtctttgcttggcctggaaccagatgtttggaggctttatttagcctctcaactctgtggaggaccaggcctgagctggccacgccttatctctagacattgttcctaccagagtgacctgacgtctttggtttggcggcttcaagctgccacactgtcagcctagcagattgtgcaggatgctgaggataaacgaacccaccaggactgcatttcacaagttctggctgggaggaagtgaggacaggcagcttcccggtgctggagacaggtaggcagcgtggcagaggctgtgggacctggaactctttagagaactcgctccggagcattctaggcacgtgggcacctctccttcaccttcgtattcccagtgcctggctcccggtgggaatgggtgagtgagtggtgagcctggtttttgatgagacaagagacgccctgcaaagactgaagaaacaatgtgaatttcctcatggctctaaactgggaattgtggagtctgaggaaagctggaaaagatgggagatggaacaggccttcctttggtggtgactgagcaacgggtctcctgttagccaagtgcaccgaggctaatttcccatccgtacgctctccaacgcctttgctccaatctcagccaaaactgcagcgtgaacggggcccagagcaggactcttggggctgactgttgcctcttgagggagggtcttcctgagttgtcttcccatcagaaccagcctttcaagagtggactatgaatggaagtcttgaggggaggatcttgcagaaatgggcgattacagggcttccagggtctatgctcgtgccaggggggatgaagcttgtttgtggctggggctgcaaatccctttcttccccccatcctagtccaaccagctctacagttacagctcacggtgtggcatttgctaaaccctcaggcaaaaccttggttggcagggaacaggagggagtgctagcccccagcacaggggatgagttcccatttgtcaaggctgggaagcagcaggaagacccctgagggtctgacctggaggggctggagctgggggctgttccaggctctgatcttgtcccccggggctacgtgtgctggaggctgtgcaggcctctggcagtcccgactctcggtgcctcaggaagatgataacacctgccaggttttgagactccggtgaattgaaccacaaagatagctaagctcagttcctggaatttgtgaagccgccaataagtaactattgcccttgcctgaagcgtggggtctgtcttgcttttctaatgctgctgaaacaaatcgccacaaacttaagggcttaaaaccacacaaatttattctcttatacagaaatctaaaaaggatctcggcccggctccatggctcacacctgtaatcccagcactttgggaggccgaggcgggcgcatcacctgaggtcaggagtttgagacgagcctggccaacatggtgaaaccccatctctactaaaaatacaaaaattagtgggtgtgatggtggacgcctgtaatcccaggtactcgggaggctgaggcaggagaatcgcttgaacctgggaggcagaggttgcagtgagctgagatcatgccattgcactccagccctgggcgacagagggagactttgtctcaataagtaaatacataaataaatagattaattaaaataaaaaggatctccagggctgcattgcttctggaagctctagggcaagcttttccagcctgcggccatacggcccaggactgctttgaatgtggcccgacacaaatttgtaaactcttaaaacattatatatttttcttttagttcatctgctgtcgttagtgttattgtattttatgtgtggcccaagacagtcgtcttcttccagtgtggctcaggggagccaaaagatcggaagcccctgctctaggggagtgagttcattttattgccatttccagcttccaaaggctctctgcattccttagctcgtggccccatcctctgtcttcaaacctaccagtgtagcatcttccaagcagtccctcaccactaccctgtctccccggccctctcactccccttctgtggccacgatgcctcagggaaagatggcattttaggcagcaggtaaagaacgaaccgaaagctagagacctttgaagatgaggaggctggttctcctgcgtgtgggggagactgagcgatgtcctggctgtgggaaagactggaagggtagggacgggcatccgggccactgcaggtggctcataaaggatatggtgggccccatgtcccagtctagggccgaatctttacttgttttttaaatgtctttccggcagggtgcggtggctcacacctgtaatcccagcactttgggaggccaaggcgggcggatcacgaggtcaggagatcgagaccatcctggctaacacggtgaaatcccggctctactaaaaatacaaaaagttagctgggcgtggtggcgggagcctgtagtcccagctactcgggaggctgaggcaggagaatggcgtgaacccgggaggcggagcttgcagtgagccgagatcgcgccactgcactctagcctgggcgacagagcgagactccgtctctaaaaaaaaaaaaaaaagaaaaaataaatgtctttcccactagagtctaagccacttgagaacaggggccactgtctgtttcccatggtatctatagggcctggtggacattcagtaaatatttattgaatgaataaataaatggacacatagcccagtggaatccccaagtactcgcgttttgcggtattcatactcggtccttggcaagcatcgggcaaggtggcactcttaggagttgaatccagctctggtgtgtgggacaggcaggaggagaggaagagagggaggaaaagtcggttcgagaacccaggtggaaaatagattgagggaagcaaaacgagatgttacaggaggaatatgggtgattgtcttttccttttatatttctgcatgttttgtatattttttataataatatctgacttttatcccctatgaaagtgtcgcttaaaataaaaggaaaggggaaaggggggccgggcgcggtggctcacgcctgtaatcccagcactttgggaggctgaggcggacggatcacctgaggtcaggagttctataccagcctggccaacatggtgaaaccccatctctactaaaaatacaaaaaaaattagtctggcataatggctgggcatggtggctcacacctgtaatcccagcactttgggaggctgaggtgggtggatcacctgaggtcaggagttctatatcagcctggccaacatggtgaaaccccatctctactaaaaatacaaaaattatctgggcatggtggcaggtgcctgtaatcccagctactcgggaggctgaggcaggggaatcactggaacccgggaggcggaggttgcagtgagccgagattgtgccactttacttcagcctaggtgacagagcgagacttcgtctcaaaaaaaaaataaaggtcgggggggaagggcagggaagcagaccgtccacgcagggttttggcctccttgctcatgagctgttggctgtgctttgcgtttgtgcaggtggaagcagggaaaggcctggagatgaggaagctggttctctcggggttcttggccagcgaagagatctacattaaccagctggaagccctgttgctggtgagtacagtccctgctctggggccttccggtccccccgcccgtgttgggtgatgtcatgctctgaagctgcttttggagttggagaggaaaggggaccgtacccgtccctccctgtggacagagtctgcagctggtctgcttctggctgggcatcgggcagcccgggtcattgccagaaagggcctgtgcctctcagctccagctctcaaaaggcaggagaagcacacccggcttagagatggcaaacacacctgtcacccacgaccctggcatagggcatcgtgaacccatcatggtgctctgcctgcctgggcgggggccgagcgccttctccacgctgtgctctgggcagtcattcccaatcaatccagttaagaagtctctgccgtcttgtgtccaagtccttctacctccctgggtgagggaaccgttagtgccatcctgaggccccgtgtcaggaaatatgaggtgggaggctgtgttctttttttttttttttttttttttaagacggagctttgctcttgtcacccaggctggagtgcagtggtgcgatctcggctcactgcaacctctgcctcccgggttcaagtgattctcctgcctcagcctcccgagtggctggaattgcacgtgcacgccaccagtcctggctaatttttgtatttagtagagacaggattttatcatgttggccaggctggtttccaactcctgacctcaggtgatctgcccgccttggcctcccaaagtgctgggattacaggcatgagccactgcgcccggcctgtctgtgttcttttgagaagcggcacagctctgaggcatcaggccaagctcagccctcggtaacatgcctcagttcccctcccagatggaggcatcgttgtgagagtctgattgggaggggaatatgaaaatgttttcggaagataaaagtactacacagatgtgaggtggttttgccttggaagaaagtgctccttagatgtgtctggatgttatgcagagtgatcgtggcgtgtcaatctttcttttgggtattttgcagcctgagacataaggtaattgtcagaaaagggagacgcagaagtgtggatctgtggaagctcattcttaacaagaattctaagatgcacatttaagtacttgccatgacgtgaggtgttgtcacacgtcaaccctgagatgctgtcagtgtcccaggggacttgacatttatgttacccaggaatgactgtgtaaatgtgcaggtgcaggccgggcgccgtggctcagtgcctgtaatcccagcactttgggagccccaggtgggcagatcacttgaggacaggagttcgagaccagcctggccaatgtggtgaaaccttgtctctgctagaaatgcaaaaaaaagccaggcgtggtggtgcatacctgtaatcccagttactcaggaggctgaggcatgagaattgcttgaatctgggggcgaaggtcgtagtgagctgagagtgcgccactgtactccagactggacgacggaagtgaaattcctcaaaaaaaaaggctgggtgcagtggctgacacctgtaatcccagcactttgggaggccgaggtgggtggatcacctgaggtcaggagttcgagaccagcctggccaacatggtgaagccccatctctactaaaaatacaaaaaattagctgggcgtggtggcgggcccctgtaatcccagctactcaggaggctgaggcaggagaatcgcttgaacccgggaggtggaggttgcagtgagccgagtttgcaccattgcactccagccggggcaacaagagtgaaactctgaatgtgcagctgttttgccacacgccaggctgagtacgtcccatctctccaggagtttatctgtgtgtacggagctgttttccaagtgaggggcagtgtggcaggtagctgagggtcctggtctggggccagagctagggcaagacttggccctgccattaagagcaggcgtattgcactgtttctcaaactgtgcctctcagcccatcagtgctttgggttgtgaaatcagtacagtgggttgtgaaaccagtacagtgggttgaaccagcatttttaaaccaatgaaaaaatgtcagcatgcatcatacacgggaaagataagtgagggaactttcggtttgttgtctgtctgtgtgcctgtatatatatgtaattgccgggcccatggtgtcttacacctgttgtgggtttgaaaactgctggctttggccgggcgccgtgtctcaagcctgtaatcccagcactttgggaggctgaggtgggcggatcacaaggtcaggagatccagaccatccttggccaacacggtgaaaccccgtctctactaaaaaagtacaaaaaaaattagccgggcgtggtggcgagcacctgtagtcccagccactcgggaggctgaggcaggagaatggcgtcaacctgggaggcggagcttgcagtgagcagagattgcgccactgcactccagcctgggcgacacagtgagactccatcacaaaaaaaaaaaaaaagaaaagaaaactgctggctttgggcaagccctacataaattccttgagcctccatttctggatctgaagatgagagggatgccattctttctctctctttccatggggttgagaagatcgggagatgctttcgggacctcatacagcgttgagttacttaagacactcaactgttagtggaagaaaggaggacaggcaaagagacaacccgtcagacattcgtgaaacacgtcttccaaaccgtgaattgctgtccaaaaaggaacatagttgtcattactaacagggtgtgtatttgaaaggagttcagacagaggatctagactgcctggccgtactggctccaggctttcagcaggtgaatgagctatcgtgcctcagtttttccatctgcaaactgggtatacaaatagtatgcttttcatggggtcgttgtgaggattaaaggaatttatacacagagttctttttttttttttttttttgagacggagtcttgctctgttgcccaggctggagtgcagtggcacaatctcggctcattataacctccgcctcctgggttcaagccattctcctgtgtcagcttcccaagtagctgagattacaggcacccaccaccacgcccagctaatttttgtatttttagtagagatgagatttcaccatgttggccaggctggtcttgaactcctgacctcaagtgatccgcccgcctcggcctcccaaagtgctgggattacagatgtgagccactgtgtccggcacataaagctcttagaacacagcctgagtgttcgttgacactgttaatttctctattgctgggagaggagacaggttagggcttcgtggtttctgccacaacacacccgttccctgaaggagggagtggcgcctgtccccatcagacacggagcccttagatcccacctgccacccacgagcctcttcctctgggccaagaccaagagcccctccctgctctgcctttctaacagctcatgccccaaaggcagaatctgtggggcaggggcccccttcctgatatgcctggcgcaggttccccccttccccagctgtctcctcccggggcaggttccccccttccccggctctctcctccccgggcaggttccccccttccccagctctctcccggggcaggtttccccccttccccagctgtctcctcctggggcaggttcccccattccccagctctctcctggggcaggtttccccccttccccagctctctcctcccggggcaggttcccccacttcccccagctctctccacccggggcaggttccccccttccccagctctctcctcccggggcaggttcccccccttccccagctctctcctcccggggcgggttccccaccttcccccagctctctcctcctgggcccctgcttggctctttcttgagcagagaccagagggagcaaaggaagaactcgctgggaggccaggtctgtggtaggagggctcaggaagaggagtaggaccctccacagccacagcctcagaagaaaacctcagagtgaaagaatcacacccttcctcctctcctccctgagctgggaacccctgcaccctccccacccctcagctaggaggaagctaaaccttctgctcttcggggtggcctcgcaaaggtgccagcttgaaggagaagaaattcgttccctccatgctcgctttcccactcctgaccccattcccaccgctctgccccagcctgtttgctttcatctgaacacttcctgatatgcaaagggctgggtgtgtgtacctaaaaccatgtgcacacacggggcagacgagcctccacacagaagcctccgtcctggcctctggggtgcttgtgggggtcatcttctggggccctcctgcttcctggtgggctctgattacaggaaaagcctgggagcctgggccgaagtagggggtgaaggaaaaaagatgaagccaactgcattgaaattctggatctccttgacactgggaactgagcttgggaactgtgtcttgctacgctggggccacagggtgaggccactccccagagcccctcccaccgctggccacgactggccctcctggggtggactcctggccacgctgcatcgcaggctctttatctataaaacaggtgaatgaggccttcctccctgggctccagtgacgagtgactcgggtggcatggcagcaagcatgccaggccttctggggcaggaggtggaggaagtgggtacatttctttcccttatttcgaaaggccggtcgctgggggacagagctgacaaacggctatgtgaagtcccactggcaagtgagaaccggcccaggcccgtcttcctgagaagcagctggtatgggagccagggttgaagtcactcacgggtcctctccgagaactcgagtggtgaaatggagagccggggcctgcccttgtccctgcagcaggactggggaggagggggtgcctgagtggtgtgctagcgctttggcagaatggctgtgccgtgccgaagctcagtgtgggtcaccttgcctttcagtccaccctcctgcccctgagcccatacgcaggacttcaccagagacaaataacggcctcgagggtcctggccagccaagggcacacacccagccctgtcccctccccgcgagtgaaatcaggagtaacagccaaggtccccatcgtgtcatgagaaccatctgatgccccaagcgcaggccccgtccttgtgactggctgtgggtgagcgtccatttcttccccttttgcagacggggtgggaagttgaggaggaagcataaccattgtgttttgtcttcgtgtgggtggcagatgagcgcgtcgcggcttctgagaaatcccgtctccttggccttcctgggactgctgaccttcctgcttcccttatttccccctcagtggggactgcgccaaggcggggacaagaattcttgggtatggggattctgtggcgactctgcgggctcctccgtggggtcctgcgttgaggtgaaaaggataaactcttacgacgatgtcaatcctgaagctagttccatgtccctcatggagggtggggagtccccaaagctttcagctcacccacctgggcttggggggacactcttcccttgctcctgcctcccggtgccttctgtttccctgtctggcatgcctctctacgcccccactcctccacctgctcagctctccaaggacctggtatgtgtgcctcctccatgcagccctccaggctactccagcacaaccttggaaccatgtggttggtgcttacagtcagtcgcatcgtccatagtcatttcatctgtgttggcccattttgcccaactggattataaaggtctcagccaggcatggtggctcaacacctgtcatcccagcacttcaagaggccgaggcacgtggatcacttgaagtcaggagtttgagaccagcctgaccaatatggtgaaaccccatatctacaaaaactacaaaaactagctgggcggggtggtggacacctgtaattccagctactcaggaggctgaggcaggagaatcgcttgaacctgggaggcggaggttgcagtgagccgagattgcactattgcactccagcctgggtgacagagtgagactctgtctcaaaaaaaaaaaaaaaaaattgcagtctgggaccatgatcgtgtacgcactgacgggaatgccagtaggtagcgcatggctgtattatcccagtttcacacatgaggctgctggtgacacgaagcccagggatgctgagtgatgtgcgcacagcagagctgcgactcaagcccaccctgcctggcctgcaccaggtggaaccccatgcgcttgcctagcaaggaccagacaccgaggggccgttggttctaggacggcgagggtcagaaggagaggcctgaccggacgcagaggggccgttggttctaggacggtgagggtcagaaggaggggcctgaccggacaccgaggggccattgattctagcacagcgagggtcagaaggagagtcctgactggacactgaggggccgttgtttctagcgcggcgagggtcagaaggagggtcctgctttgtcctgcatggattgttggatctgggctttttagagctcggaggatgaaggagccagaaggcagagcaccatctgggtgtctgagtagatgagacgacttcttccagtgaacatgggttctgtctccatcagagtgaggcgatatatctgagtagatgagacttcatcagaatgaggtgatgtgaggctggagtgaggctgggctgggagtttgccgtggttggctggagctggtggtcgtcgttcagagggagctggcgctggctttggtgttcccttcagtgcagcattttcagcagtggagtcacccattctctgctagaatgcttctcttgtcggaaagctcactacttaatcctatgggggacagctctagtgagcccgaatctgaccccataacttttccccactgttcctgggtctgcagagcaacgtagattaagtctaagcctcgtttttgtttttggagacagagtctggctctgtcacccaggctggagtgcagtggcgcaatcttggctcactgcaacctctgcctcctgagttcaagagattctcctgcctcagcctcctgagtagctgggattacaggtgtgcaccaccacgcccagctaatttttgtagttttagtagagacggggtttcaccatgttggtcagacttgtctcgaactcctggcctcaggtgatctacctgcctcggcctcccaaagtgctaggatgacaggtgtgagccaccgtgaccagccaagtctaagcctctttccacgtggccttcaggtaggtgaagaacatcaacagaatccgacatggctggccgggcgcggtggctcacgcccgtaatcccagcactttgggaggccgaggtgggtggatcacgaggtcaggagatcaagaccatcctggctaacacagtgaaaccccgtctctactaaaaatacaaaaaaaattagccaggcgtggtggcgggcgcctgtagtccctgttacttgggaggctgaggcaggagaatggcgtgaacccgggaggcggagccgagatcgcaccactgcactccagcctgggcgacagagcgagactccgtctccaaaaaaaaaagaattcgacgtggctgctctccctctggccaccctgcccttccctgccacaccttccctgtatggcaggttatcaggccctgtgtcctgcagggcctttgcagtacagcctggtcatctttggtttttttttttctgattattcatattcattcattgtaggtgatttataaaatgcagagaaccacactgaggaaatgcctgcacgtcccgttatcccacggtcccactgctaggctggaaggtgatggcatcagctcccggccagtgctgggggttggtctgtgttatctgccacctcaccgtctacactggcaggccctggagcatcttggtatagacaggcaggcattgagaaagagtctgagactggagacccctgccatgcgcagtgggaaggaccatcacggtcgcttagcaatgtctgccacgggggtgggctgcagtgggggacacgtgaacgcccatgcctctccctgtgccaagtgacgggaacttggaacatcagtgaggccaagactggtcttgagtaacttcgggtccctaccttctgagtcctagaaccacattctgtttcttggaaggaaacagctataggcttgagttccctgtcaaccctcccttccactgaagtgtgacaaggagcttatgactcggggcacaggctatcgtggaagaaagacgcggatcctgttaacccagtacaggctgctgctgagctcagctgcgtggtaggggagtgagcccaggcaccacccctcgggcctggcacagctgccaggccaggttcctgctgtcgagtgtgcggcttgttggggcctgtggcagtggctccttgatacaaagctcgtttcagtgccctgcctttggcagccttgtctgggcaggacttgggcagcgggaagggctaacgatcggccccggggcctgccgacactctggtttgtttacccccgacctctgctctttcttcctctgtttctcccagcccatgaaacccctgaaggccaccgccaccacctcccagcccgtgctcaccatccagcagatcgagaccatcttctacaagatccaggacatctatgagatccacaaggagttctatgacaacctgtgccccaaggtgcaacagtgggacagccaggtcaccatgggccacctcttccagaagctggtgagtctgccagggatggagggtcctcacgcagggcctcagtggagcccatagtgttgcaggagcctcaggagaggaccgggcagccctctcggactccttgaaggcctgagacctctccgagtccgggaggaaggcctgggcctgtgtgttatggggtgcctggggccggggccttgactctaggcctcccctggtgcagccctgggagcttctggggtggtggagacaggctgtgtggataggtccttccaggggtggtggagatgggctgtgtggatgggcacttctgtgggagcaccatctctctcccggagggtgctccttctccctcccggagggtgctccgtctttcccggacggtgctccctctctctcccggagggtgctctgaggaaccagccctggaatgaaggcttcttgctgggcttcagtctcctgtccctcagtgaacagaggggcacatgccgggttaggggcatgaggactgctcccctgagacctcgggtctgtaaaaggaagcagttgggcacactggccgatgatcctctcctgaggtcccaagagcaggaagcactgaagcccagccctgctcaccactgcagggtcgggagcggcaggagtgggtgggttaacatgcagacctcgtgttgggaaacgttcacagaagtcttctggttccctgtgcttctgtgacaccctctcccccagctctgccccatctctggctgtgtcccctggaggacccccaggtcagactcatggagctccctccccacctctgctacgtaacgtctgaccgcccagcaggcaagagggagactgggagtccaggccgcggttcttctctgggtgtgagtggccagaggaccttctcctccttcctgccctgttctctgggtgtgagaggctggaggcctcctcccctcccctgccgtgttctggctgaatggacagggctctgcctttctcacgctggagaagactctccctctcctgcctggacactcctaggacctctagctgagtgtgttcagagctgagctccctgcctccggcgtcacctgctccgcttcctgtctttacctcaccgagtgcttcagactctttctggctgcaccccctcccccacctgtcctgtggactccactttttggccgttgctcacagccgccttttcctcttcttggccacccatggccctcacctggacagctgcgtatcctcctgtgtggctcctgcctccaggcccactcacctcccacccccacctctccttagaggggagagagtcactgaaacctcgacggccccttcagcggatccccacggccctcggatgaaggtcaggctccgaggaatggctcgagagaccctttgcacactgacccgtgtccagccccagccttggcagcttcctccccgcacctctgtgctcctgacactggactttctgttctcagttcccagggcaggcactttcttaactcttggtacttgaggccccgtgtgcctgaaacgtccttccccctctcgtctggcctcccctggtcagttcccagcttagaagggacctcctccaagaaggctttccaagtcgccaaatgcaggccttgtgccagtcctcgtagtgagcactagtaactgcctgactcccccaaaccacaagttccaggaggacggactgcatttcctttttttgttgagacggagtctcactcctgtcgcccaggctggagtgcagtggcgtgatctcggctcactgcaacctcctcctcgcgggttcaagtgattctcctgcctcagcatcccgagtagctgggattacaggcgcccaccatcacacccggctaatttttgtatttttagtagagacggggtttcgccatgtcggccaggctggtctcgaactcctgacctcaggtgatccgcccgcctcggcctcccgaagtgctgggattacaggcgtgagccaccgcgcccggcctgcatttccttcttcttagactcccagaaccagcccagtggtcactgcttgaatgagtgaatgcaccgtgaccttgaccactgggcctcgggagaactcggaagggcatggagggagacgttgcagggcctgagatttctgtcctgagagtcctgtttctccagcacagcttctagagccgtgtcacaaagtgggcttgaatcccagcgctgccagattaaacctgcaactgggcaacttacccaaccgctctgaatcagcttcctcatctgtaaaaaacaggatagtaacagtatttacctcattgggtgattttgaggagttaatatctgaaaactgcatggggctgagtgtggtggctgacgcctgtaatcccagcactttgggaggctgaggctggaagatcacttgaggcttagagttcaagaccagcctgggcaacatagcaagaccctatctctacaaagaaatagaataggcctgactgagcgtggtggctcacgcctgtaatcccagcactttgggaggccggggtgggtggatcgtgaggtcaggagttcgagaccagcctggcctacatggtggaaccccatctctactaaaaatacaaaaaaattagcagggtgtggtggaatgcacctgtagtcccagctactcagggggctgaggcgggagaatcgcttgaacctgggaggcagaggttgcagtgagccaaaaccacaccattgcactccagcctggatgacagactgagactctgtctcaaaaaaaaaaaaaaaaaaaaatggctgggcacagtggctcacgcttataatcccagcaacactttgggaggccaaggtgggcggatcacctgaggtcaggagttcaagaccagcttggccaacatggtgaaaccccgtttctactaaaaatacaaaaattagccgggcatgataacacgcacctgtgatcccagctactactcgggaggctgaggtgggagaatcgcttgaactcgggaggcagaggttgtagtgagccgagatcgtgccactccactccagcctgggcgacaagagcaagactctgtctcaaaaaaagaaatagaatacaataaagtaaaagaaaaagtgcttggaacagggcctggaacatcataaattaataagtactcaataactggtcattatcatcagtgccattattattattattattattattattattattattattattaaattgggaagaggcaccctggaaggtatccttccaagggaatgccacactctggttctagcatacccccccctgctccctccggttcagggatggtgaacacctgtcatcactgcctgctcacctgagctgagtggcctggggggcatcctctcctcatccctcaggagggtagaggagagcaaacctagggttgctggaaacgctgtcacagtttatctttgtcacttggacctggctgtccccggttctggtcttggctccacaggcctggccgtgaatctgctacccaccactttccctccccagcatcgtgaaccgatgcctgaggcccctggggctgcagatttgggagggcccggggggagccgggtcaggtctggcatccggaggtggtttattttcagccgaagactctgggtatttgattattcgttactgagagaagggaattagcgtctctgctgtttgttttatgagatcactccagtgccaggctgctgtttccaggcaacctgcacttcccagttaatgaacctgccaagccaggcctcgggccctaccgcctggggtgactgtggcagcggcagtccctgagattaccgtgaccctggacgcaggcctccgcacggctggctcctgcccctggctcctgggagggtggtgtgccaacccgggcctccaggctttctccttcttgtgggaaagggggcaagaggagccttttcctggaagaatatcggtgatctgactttggcttaggcagcgactgtctagtatgcctcgtgtagcgtgggcattgatgggccgggcctcagtactccctggaaaaggaaataaactccctcccgtccggccccgcccccttttaaggtcaggccccaccccctttaaaactcaggccccgccctcttttaaaagtccggccctgcccccttttaaagtcctgcccttctgcagctgagacctgaatgcctctggccttggcgtcacgccgggcgtccccactcgcgctcccctctggcttttccagatgccccccgctcccctgccccaccagcttcctcaaagggctctgcctctgtactgggaggctccaggctcagccgatgctgcggccagcctgcccccacccctacccccaccccagcctctctgggtccttggggagcatgaggatcctgcagaaagcagagtggtccggggtgggggtccacagcagcccacttcccccagcaccttggtgggaagcagaggcccctgaggaagccaggcagcagctgtatcccccttgctgctgtattgaaaaacatttaaaccagaaactccaaagaataacagcagaaccttctaatgaagaaaatacagcgtcacacatgaaggtggagtctcccctccctcctccctcttgaagcagctactggcatgaatttggtggatagccttccagactgcagtttgtgtgtttactacatatctgtatctattttgggttggcctgtactttaaaaaaaaaaaaaggtcttgctatgttgtccaggctggacttgaactcgggctcaagtgatcctcccacctcagtctcccaagtagcgagggctataggtgtgtgtaccacagctcccagctgcatgtactttaaaaatgtgtctaagccaggcgtggtggctcacgcccgtaatcccagcactttgggaggcggaggcgggtggatcacctgaggtcaggagttcaagaccagcctgaccaatatgacgaaaccctgtctctactaaaaatacaaaaactagccgggtgtggtggtgcgtgcctgtagtcccagttagtcaggaggctgaggcaggagaatcacttgaacccaggaggcggagtttgcagtgagccaagatcgtgccagtgcactccggcctggttgacagagcgagactccatctcaaaaaaaaaaaaaaaagtgtataagtatacacatatatcatattttacagttcaacccatgttcgttttggagcttgtcagcaatcgtattttacagttcaacccatgttcgttttggagcttgtcagcaatgctatgtgtaaatcgggtgcatccatgttcatggctgtgtgcgcggcttcccccgtttgtgagcatttgttaccagtccctccactatgaggaggaaaagtgagatggtgaacacccttgagtcccctggggcacacacataggccatttgctccagagcactgctgtctaatggaaatagcttatgagccacgtacatcatttcacattttctaatacccaccttttttttgtttttttgagacggggtcttgctcttgtcacccaggctggagtgcagtgatgcaatctgggctcactgcaacctccacctcctgggttcaagcgattctcctgccttgtcctcccaagtagctgggactacagatgcgtgccaccacgcccggataattttgtatctttagtggagacagggtttcaccattttggccaggctggtctcgaactgccaaccttaggtgatctgcccgcctcggcctcccaaagtgctgggattacagttgtgagccaccgcgcctggcccctaatacccacatttttaaaagtaaaaataggcaggtgaaattaattttgagaatatcttttatttattcccgcagatccaaatattatttgaacatgtaatcagtatttaaaaattaacgaggtaatttacattctcttttacatactaaggctttggaacccactgtgtattttacatgtccggcacgtctcagtttgaaccggccgtatctcaggtgcttggtagcctcaggtagctggtggcgactgcactgaacgatacggctctgcagtttgtatgtaaaagtggatttgctaagcaatcgatgggctgtgcctatccacactgttattagttcaactgaaaataggccatgcctattctcagctttattagttattaacaaattgctctccaaataattgtactaatttacacttccccgagtagtctaagagtttaaattggccgggcgcggtggctcacgcctgtaatcccagcactttgggaggccgaggcgggtggatcacgaggtcaggagatcgacaccatcctggctaacatggtgaaaccccgtctctactaaaaaaaaatacaaaaaattagcctggcgtggtggcgggcgcctgtagtcccaaccactcaggaggctgaggcaggagaatggcgcgaacctgggaggtggagcttgtagtgagccgagatggcatcactgcattccagcctgggtgacagagcgagactccatctcaaaaaaaaaaaaaaaaaaaagttttaattggccgggcgcagtggctcacacctgtaatcccagcactttgggaggccgaggcaggtggatcacctgaggttgggagtttgagaccagcctgaccaatatggagaaacgccgtctctactaaaaatacaagattagccaggcgtggtggcgggcgcctgtaacgccagctactcgggaggctgaggcaggagaatcccttgaatccgggaggttgcggtgagccgagatcgcaccactgtactgcagcctgggcaacaagagcgaaactccatctcaaaacaaaaacaaaaacagggagtttaaatttccccatatgcttgccagccgttgctgtcaattagacttttaaattttgacccttctgatgagtataaaatatctcgtgatggctttaatttgaatttctaccctttggtcccttaagaggaagtgcttatatacagcgcagcgaagcctttccataaatatttggggaattgacttatggagcctcggtttccccttttgcagaaaggggcgatggggtctgccctgcctctcagaagaggcgaggctctgtgtggttgtgactcaggttgtgactgtgtgagtgacaggcaaacgtgtagtgaggctggggctttggctccttggaggtagaggaggtggaagaggtgaggacggggcctcaaggccaagggaaatggaaagacagcatcttcatttgttgttttgttttctttttgagacggagtcttactctgtcacccaggctggagtgcagtgacacgatcttggttcactgcagcctccacctcttgggttcaagcgattctcctgcctcattctcctgagtacctgggattacaggcacgcgccaccatgcccagctaatttttgtatttttagtagagacggggtttcgccatgttggccaggctggtctggaactcctgacctcaggcctcccaaagtgctggggttacaggcgtgagccgccacgcccggccaagacagcacctttaaatgtcgttccccacgctgcacgtggggagggaggcctgagcaggccacacgtgccagctccccccagcacacacacccccctctctccctgctccggctaattccaggatgtgaaggaagtatgagacattaagggatttcaaaccctgggagaccttcaccgtgctgaggaaagctggatgctgtgaagagttgaatttctagcaggccaacaaaggccctagcctggtctccccaaccccagaccccctcattaaccttattggctgagctggtttccatggaaactgtccagttcaaagggacactgtaatatgttcatccctgcgtttccccaagttcccaacgagctgagtgagaggttttcagtgcaggggagctcccggtgctccgtgaagctttcatccattcattaatcctctcccctcccaccctcctctccctctgttccctgactcctccctgcaggccagccagctcggtgtgtacaaagcgtttgtcgataactataaagtcgctctggagacagctgagaagtgcagccagtccaacaaccagttccagaagatctcagaggtaggccgctccccacatagccaccctgagggacaaggagctttgggggctgctcagagcccttggtctcccctccctcgcttgccagtcggtgaagtggttactctaatgggtaacacttagcctgatatttgctttcttgcacctgacattttccctcttaatagaaaacgatctattttatttatttttttattattctctttcagattagagagaggaacaggggaggcaaaaaaaaaaaaaaaaaaaaaaaatccaaggcagtgttctcccacaccacactatggtgaccttgagcaagtcacgtcccccctcttggcttttatgtcctgtccggtagaatgaggggtttagaaatggccagataatccttttttttttttttttttttttgagacagagtcttgctctgtcgcccaggctggagtgcagtggcgcggtctcggctcactgcaacctctaccccctgggttcaagtgattctcctgcctcagcctcccaagtagctgggattacaggcgcacaccaccacgcctggctaaggtttgtatttttagtagagatgaggttttgccgtgttggccaggctggtctcgaactcgggtgatgtgcccgtctcagcctcccaaagtgctgacattacaggtgcgagccactgagtccagcttggccagctaatcctgaccttgcttgataagaatcactggggcattgtttaaaacacagatttcctggcaccttccccggagcttctgattcagaaggctttgcgtggggcccaagattctatatttgaacaagcttctgggtaatatttatgacagggaagtcttgaggaaatttggactataggtcgtcttttaaggttcttgccaactctaagactgccatcccataaacacaaaaagggtaagagccacttatgtggagaaggagccttagaatccctggccgggaacacgcgtgcttctgctcctgaggcccagccttcctggccaggaacacgcgtgcttctgctcctgaggcccagcctacctggccgggagcacacgtgcttctgctcctgaggcccagccttcctggctgggaacacgcgtgcttctgctcctgaggcccagccttcctcccgcactcctccacagggcagaggtgcagtcctatctgccatcaacatttctacctaagaggtggcatggagggacagttgcttaggatccttcaggacagagcccagttcatccctttgtccaaaaagacctcagtggcacccctgaagcactggcctgagaggaacagcccccagctcagggcaagagaacctccatcctagaaaaggggagaagcttctgcagttttgggagtcctgccgtaaaggcccctcttggccctttgtgttcccgtctcagctctaacgctagaagagttggggaaacgcagggtagttttcctgaaacttcaggggtgacggtcgatgcccacgtttagaatccaccgagaggcagcagagaagctgacagttggagatgaacatgtcaccttcattactgttaaaaaaatgcagcttggaaaatgtggatttggatctgtagccacagtgggcttgctgacacttcgcctctggaatgaaacgtacctatagaagccgggcgtggcggctcacacctgtcatcccagcactttgggaggccgaggcgggcggatcacctgaggtcaggagtttgagaccagcctggccaacgtggcgaaacgccgtctctactaaagatacaaaaattagccgggcgtggtggtgcacacttgtaatcccagctatttgggaggctgagacaggagaatctcttgaacccgggaggtggaggttgcagtgagctgcgatcacgccactgcactccagtctggtgacagagcgagaccctgtctggaaaaaaaaaagtatctattgagtcccttgcaggaataggaaaacacaggcccctctccacaatgaggacagagcccacgcctcttacccagtgtgcagagagaggatggctgaccatagtttcttctcccagacccatggagcagatgtgtcaccctctgcctgggaggacgaagtgcagggtggggaagtccctctccatggagtcaagtggctggagaggccaggtgcagtggctcacgcctgtaatcccagcactttgggaggccgaggcgggagattggcttgagcccaggagttcaagaccggcctgggaaacatggtgaaaccccgtctctattaaaaatacaaataaaaggggctggagaaatggtgctttccctgcggtttccagcccaacccaggaactacctggactcccctggtctgtgttcagatcagccctgccaaggccgcccaagatcccggggtcagacatggtgcagagagtgtggggtcttctcttggcctgggctgattgcctgttctctgtgcctaggcagaaacccccacacccaaccataagcccctcacagcctgcccaccctggagggcagagccaggcccctggctttctgccaggtggcttctcatcctgactcactcgatgacgtgcttgcttcctgctgaggctgccacttaattactgcaattaggctcctctctgcagcaggagtgatttcataccctagacttcactggagggggcgtgaggaaacattcccgaaatctgggagtccaggcaccagccagagacacaggctggggacgctgagtatcccccacccccccgccccccaaaatatacacacacccaagctccatctccaggagttttctctgtctagaaacagcttgagacagaagtaggaagttcctgctgtctgagcgcttcctcccctgcagaccaagcaggtggcatcacctcggcagctgaccttggcctcatcacctgggcagctgaccttggcctcatcacctgggcacctgaccctggcctcatcacctgggcacctgaccgtggcctcaccttgcctcctgccttccctcccacacccctctttgaggctccgtgtgctccgtctgccaagtggggatggtattacagctccagttgcaggctgcactgtcctgttagcaaaagctggggctggaacgtctctaaaggaggataaagaggcttggagcagatgagtcatcccgggggtctttccagtactcactacctgctgcctggcttgggatccaggaggggcattggctgttcctccctcgaagcttcctctcggacccccagcatgggcagtggtgggtggggagtgtcgggggtgctgggggctgagtaagtgctctctgatgggggtaggatgcagctcactgtcctggggagctcagcatctctgccgaaggtccaccacttccctgctggcgtgtgggacccttccttcctacctcatgggttcctcatgccctaaagattggctggagtacctggcgctggtcaactcaaaccctgtctgcccttggccgacgtgtagggttcctgagtcggggttcctgtaatcacagggctccctgccagcctctctcatctctgggacctggagtcccttccttcttgcccacgccccagccactggactccacgaggctccaggagttcacaggtgtggtgcaggggattggggtggcagaggcagcccatggccatggggctcctttgtctttctttttttttttttttttttttttttttttttttttttttgagacagagtctcgccctgttgcccaggctggagtgcaatggtgtgatcttggctcactgcaacctccgcctcccaggttcaagcgattctcctgccccagcctcccaagtagctgggattacaggcacctgacaccacacctggctaacttttgtatttttagtagagatggggtttcaccgtgttgaccaggctggtctcgaacttccgacctcaggtgatccgcccaccacggcctctcaaagtgctgggatgactggcgtgagccgccacacccggcctctgttctcatatgtacaccctgagtttcagaactccccttcttgccaggctcacagtgggggctgggagaggtgagggacagaacaggccatgactcctctcctccctttggcaggaactcaaagtgaaaggtcccaaggactccaaggacagccacacgtctgtcaccatggaaggtacctcggggagcgggctggattacaggcacctacctttgtctggctgtgcaggcaacaggctgcgtgaacgcggcgcccttccccttgtgtgtgcgtgtgtgtgagcgcgtgtgagcgtgagcgtgtgtgagcgcgtgtgagtgtgagctgagtgcgcgtgtgcgcgcacgcgaggactctagcctcgtgcccaggcagccagccagctacaaacgtgctcctctttaggatgccagcaggctgctggctccctccctccctacccctcctccccttccccttccctcctctcctcgccacgcgcctccctcccctcccccttgctggaagagcactccggagcggctgcccgatgctggagtccgtgcggcagcatcagcaaggtggctgagtggccgggctgctggtgggcgccggggagcctggagcgatggctgcacgctcccgccgcggggacagaggctgccatggagattctcctcattattcgcttctgctgtaactgcacctatggtaacccaggtgctcgctgtgggaggtggcggaccctcccacctctgggggccggctggagtgggcttagatgtggccggggaggttagagggccgcagggaaggagggtgggcgagcggctggacctgaattcccccttcgttttggcggcatccagcctagagttgaaacctgggggctgctcagagcagggccgcttgcaaatggaaggaccaggctggaggggtccaggtggccccgaggatcggtggggaattggtgggctagtgtgagagaacttcctggaggggctgttagggagagacggcgacgagctgtgcccgcagacgtagtagccctgaggccagggagagggtctgcgggggccaggcacagcgtggcgatgggtggcgatggtccggacggcggcgttgccagccgagagggtgccagcgcgagccagagggagaagttgggagtttctttgtttctggagagaggcgcggaggctgggcggcacggtattgtgtgctccgcgcacatgcagcagtaggcggaggacacggaggggctgtgggagcaggaaggagaggtttgtttccagccgtgagagacccccagccgaggtctgggccctcaactgtggaaggcaggtcggcagggccagcgggagaggggtgtggcaagctactctgtgaaggtcacacacacacacacacacacacacaccacctttcggtggaagggacccggaccatcctccttgcagctcccgcagctggctgggggctggggggaagtcccgggacaggtgcatgtcatcaacacgactgtcggtcgtaggaggatgaagccggcccaggtagggaggtgtccagaagcccgtggaccctgcctcaagaggcaagacgtgccaaggggtgccctgcctgcctgtggcagggagtggggtgggcacgtgtggctcccaggccggctgctctgggcctgagtctgtgggagcagcaggcggctggttttaggaccttcctcttccttcccaccaggtgtttcggctctgcacccttctcagtcactttgctttcctatctccctggtaacctggagctccttggagctccttgtcgaaggctgacttgagggggatggtggcttgccggaagagagatggcaggtttcctgggctccttcccaggggcggctgtgctggaggggctgtgtggggccagtgccccctgaccttctcaggaccctcttgatggaagcaagctctgaggcagcctctctcctgcggcccagcagggcggctgcaggaaccctgttctcacttgaaattggcctggtcagcgatcagaggagaaatggtctttttggtctggcctaggagttggtcaggtcttgactctgcctccctgaaaaggaaacgtacccttggcttcctctcccttccccaaaaggaagcttcgactcagtgaaacggacctgggacctggagttcacgttgcttcggtctccgtgatactgttgttgaagtcggcttcaaagtggggaatgaggagtgaaagggccagctcgtgaggagggggctcaccccatcctggtcactctttccaagaacgctcctgtggttcattgaggttttacaggtgctgcctttccctgaagaaggtgcagctcaaagcaaggagtgcgggtggatctacccagctcccaccacttgtagccacaagtctctggcctcagttgccttgtctgtaaaatggggctagtgagaattgcttcccgttttaatcacaggaaataatgagagcaaagcagttaactcagtacccttgggcacagagcgagtacccagcaaactagagagagaccagcttgctgcccaagtcagtgtcagtggagagggagagtgggtgaggccgggcaggaagcaggccagcctgcaggagcccagggacaggggaagggccagagcgagtgcctcaccctgagttctcaggggaccccagcgtgcaggggccgtggggagcacaaacttcagggccgctcttattcccccggttccctccgtatctgatgtggtcccagtgccgccaccccccccacccccaccccccccgtgcacctgccctcctggccgcccttccagggctcattccacagccttactcaggtggactctggaggtgaccacagacatgttaataacccctctgaaacccaacctgccatgtgttcagacctctgagcttagtcagaaacctcttcctcttgggacccaagagagggctgcggggagccgataatgcagtgtcagctttctgtggagccgccactccggagcccaccctggcaggtgtctgctgagcttgtgctttcttttgggtctctggggttctccagtgtgattttttccccctgaagatgggctgagccacaggtgggtgccttaaacagcctcagaaatggatcccacctgagctaggacctgggctgcaccctcagtgccgaggataccccaagactggcctcattccttcaagcttccatggcccatggggagggtctctggaaactgctagataagaaagggctacagatatgtcatatgaagtgtatttacgtaaaccagtggttggccgggtactcatgcctgtaatcccaacttttggcagactgaggcaggaggattgcttgaggccaggagttcgagaccagcttgtatttggcttgaggccaggagttcgagaccagcaacatagtgagaccttgtctctatatttatttttatttaaacgaagactcactgtgtcgcccaggctggagtgcaatggcgcaatctcagctcactgcaacctctgcctcctggattcaagagattcccctgcctcagcctcccaagtagttgggattataggcgcctgccaccacacctggctaatttttgtatttttagtagagatggggtttcaccatgttggccaggctgttcttgaactcctgacctcaaatgatccacccgcttcggcctcccaaagtgctgggattacaggcgtgagccaccctgcccggcccctcgtctctatatttttaaaaaaattaaaataaatacataaataaaacataaagcagtggttttcaaccattattatacattcaaatcagtaaagaagctttatagaaatgctgatggcccttgtggtcttgcagagatttgggttgagttgacggggctggggagcagcatctgtatcttttaaccgctcccccagtgattccgacaggcagccaagctcggactgcgggtaaggctggtggccctgctgaggctgcattttcttcacagccagcagattgctccctgaagtgtctgcttagccgcgcacggggtatttatatctcaggctttggagaactatcaggtttggggcccggctagggcgtgcgtgttcacgctgggacctgtcacaacctggtcttatgggacacccagtctgggatccttcttcccagatgaccaacctgcctctgtcactgcccctgcggcaggaggcccaaggtcatgaccccagggacagagcatccaggtgcaggactgaagctgagcctcctgttgggagggtgggcgcagccgcgtacaggaagggtgttgggaagtgttgatccaccagctgccacctccacctgtccctgctgaatcccagccatcctcacttggtgtccgggttgtggagggtgtggctcttgggggcctgggctggccttgcctgcgtcctcccagcctctttggggctctcatatgtgaggcctaacctgagttgcttcaggaaacctttgcccctcaggctgccacgtgtttgagagcacagccttttttctttttttttgagatggagttttgctcttgttacccaggctggagtgcagtggcatgatcttggctcgctacaacttccgcctcccgggttcaagtgatttccctgcctcagcctcccaaatagctgggattacaggcatgtgccaccacgcctggctaatttttgtatttttaatagagatggggtttcactggttggccaggctggcctcggggagcagagcctttctgtggagatcaggccagcctcctggcctccagcctccctgcctccagccttcctgtgctttgctatctggggtttgaggatgtggggaggggtctttcctctgagagatgaggccagtcctgtggatcacagtgaggcatgccaatcccagctggctgtgcctggccttcagctccaggagcctgagaatgataaggtctggagagctgcccttcctggaaacacagcatgtctccttcccccattctggggtcctgcatgtggcaggtgtgctagactctgcagggcatggctgggtggagctgtgtgattctggggttctgcgtgtggcaggtatgctggactctgcggggcgtggctgggtggagctgtgtgattctggggtcctgcatgtggcaggtgtgctagactctgcagggcatggctgggtggagctgtgtgattctggggttctgcgtgtggcaggtgtgctggactctacggggcgtggctgggtggagctgtgtgattctggggtcctgcgtgtggcaggtgtgctagactctgcggggcgtggctgggtggagctgtgtgattctggggtcctgcgtgtggcaggtgtgctggactcttcggggcgtggctgggtggagctgtgtgattctggggtcctgcgtgtggcaggtgtgctggactcttcggggcgtggctgggtggagctgtgtgattcagggctgggggtccaggagagcatctgccttgagccaggtgaggccaggacaggcctggggaggggggcggggcggctctcgatgaagccatgtctgatgggagaggaggcagggctgcggagggagcaggggctgccagggctgtgtgtcacctgtgtctgctgtttggtcggcccggggagtgagaacagaggtgggggctgccgtgggctcactctggtgtccctcgaggggtgttcacgtgggaagcatgcgggtggggggacgaagctggtctctggggtgttgggttgccctcgtccatcatcctcttcctccttctccctgtctcccccgacagctctgctctacaagcccattgaccgggtcactcggagcaccctagtcctacacgtgagtgtcaagcctccgaatggccagagagggcttaggagttcagtggaagactgagcctgggtgagagggtgctggagtcaccgagaacagtccacctggggaatcaggggttcctaggctccaaggatgcctgtctggcccgcggtatccatgccgccaggctagggcctgaatacagcttggctactaagcttgacgtggccaggtgctcccggggaggcaggcattcctgcttccccacccgctgcctcctggtctccagtgtccttggagcagctgcagggcagacacagggtttctctcccagctgctcggggggatgagcctccacctggtctccacactggggagagagtatgactgtggccaggagaagagggggcagccagggccctctcccctgctgtgctggctctgattttttttttttttttttttttttgaggcggagtctcactctgtcacccaggctggagtgcagtggtgcgatctcggctcactgcaacctctgcctcctgggttcaagcaattctcctgcctcagcctcccgagtagctgggactacaggcgcccgccaccacgcccagctaatttttatatttttactagagatggggtttcaccacgttgcccaggctggtctcgaacttctgacctcaagagatcccccgcctcggcctcccaaagtgctgggatttcaggcatgagccgccgtgcccggcctgactctgatttgtagttcagattttgcgggaattaggcaggtccctgagtgcccaccctttggatggggactgagcactccccggtggccacacatcaggccccagagccgctcccctcaactcaccgcctcacccttcccaggacctgctgaagcacacacctgtggaccaccccgactacccgctgctgcaggatgccctccgcatctcccagaacttcctgtccagcatcaacgaggacatcgacccccgccggactgcagtgacaacgcccaagggggaggtgagctcagagcccggcacggcccctcacccaggctgagaagtatcaggtccctcgtccccttctctcacacacgggcggcaggtccctcgtccccttctctcacacacgggcggcaggtccctcgtccccttctctcacacacgggcggcaggtccctcgtccccttctctcacacacgggcggcaggtccctcgtccccttctctcacacacgggcggcaggtccctcgtccccttctctcacacacgggcggcaccgggtgcctcctgcctctccaatcctgatcccccattcccagccaaggagaggttttcagcccttggtcaccctgatgacctgcagctttccaggccctaggctgagaagtttaagtccagtgtctcattaatcctcataataatctagggaggccgggcacggtggctcacacctgtaatcccagcactttgggaggctgaggcaggtggatcacttgagttagaagtttgagaccagcctggccaacatggtgaagccccgtctttactaaaaatacaaaaattagctgggcgtggtggcggatgcctgtagtgccagctactcaggaggctgaggcaggagaattgcttgaacccaggaggcggaggttacagtgagccgagatcgcaccactgcactccagcctgggtgacagagtgagactccatctcagaaataataataacaatccagtgagccagaagaacctgaggctggggagtctctccaggtccaccacgcagtctttcagccactggtgtcagagctggattcctcacctgggactgtctggaggcccacgccggggaagtggcctccgggtgcctcattcttgaatgcagacacctgcctctggccagtgtgatgccgtcagggtctcctaggaagcgaagggagcaggagcttggagctgcttcagctcggcctgcacacgcagtggcttgcggggagcccacagcaggaaaggctggcgttggaggtggtggaggccgtccaggttgccggaatgtccagtgggcacctgcatgtgggacagccgttccctgggggcccttcttgatgcaagggtggggacagcccagcaaggggagtaccaggaagcatgagagggacagttgccttcgtggattggcagccgggcccgggtgaaaggcttcctgtccaggggaggccattaggcggccgttacgagtgaggctgacagggtgtctgctcctgtggtctgtttacgagcccccagggtctcctggggagaaagtggtgagggacaggcctggacagtgtccactgggcagagagagccgattccgtgcggctcctggtgctgatgtgcagcgtctggggatcccgtcgtctgttttactctggggatatctgaaaaatctccagagggcttagcgtaccctccgttttcagtcatcctttttttgagactgaatctcattccatcgtccaggctggagtgcaatggcgtgacctcagctccactgcagcctccaccctctgggttcaagcaattctcctgcctcatcctcccaagtagctgagattacaggcaggcgtcaccatgtctggctagtttttgtatttttagtagagacggggtttcgccacgttggccaggctggtctcaaactcctgacctcaggtgatccacccgcctcagcctcccaaattgctgggatgacaggtgtgaaccactgcgcccggcctcggtcatcttaattgtatactttgaatacgctcacctacgtattacagcagatgtaggtcacaccgtgtatcatacaggaaaggctggcacagatggggacgaccccccggctctgagcgggggttggaaactctggaactcccacgtggagcagaaaccacccagagcccaggttagagttggctgcaggtcccctctgggcactgctgcagtcccaggctggagggcccaggtctcatccccagggggctggagaagccagggaggagtagcacagacaggcctgagtgggtctcgggtctcgggtctcggttgagccggggctagatgaagttcgccgccgcggtcgggagggattgcaaacggggatgttcgtgccccagggtggagaaaccaggtcgtcccgggcagggggctccagggttagccgcggagagccccgtgcgttgcacacacttaatgtgccaggcactgtgctgtttcacatgcaccatctcgatgagtcaccttatgaggcagacctcactgtccgcacttaacagaaggtgaatctgggattcagagaggtcagggagcctgtctgagatcacagctgagaagcctgttggcattcaaacccatgcccatgtgactccaaaggcagtgcttgaaccacctttggttaagggatgacaggctatgccgcctctcggtccagtcctccctggctggccgtgcccccgtgtgcaggctctgccctcggccgcattcccctctgagcaggctggggggtctgccatctccctcagacgcgacagctggtgaaggacggcttcctggtggaagtgtcagagagctcccggaagctgcggcacgtcttcctctttacagatgtcctactgtgtgccaagctgaagaagacctctgcagggtgagtgtgtgagtccaggggcacggggcgggggagggggtccggacctctgcggggtgagtgtgcgagtccggggcgggggagggggtcctgacctctgcggggtgagtgtgcgagtccaggggcgggggagggggtccggacctctgcgaggtgagtgtgtgagtccaggggcgggggagggggtcctgacctctgcggggtgagtgtgtgagtccagtggcacagggcgggggagggaggccggaccctgccacccatggagccttcagcaactttgttggttttttttcttttgagacagggtcttgctctgttgcccaggctggagtgcagtggtgcgatctcggctcactgcaacctctgcctcccgggttcaagcgattttcctgcctcagcctcctgagtagctgggattacaggtgcacgccaccatgccaccatgtctggctaatttttgtatttttagtagagacggggttttgccatgttggccaggctgatctcaaactcccaacctcaggtgatctgcccgcctcggcctcccaaagtgctgggattacaggcatgagccaccgcgcctggccggttttttccttttaaaaactatattaattaacttaatttcactacatagccttttttcctgaaagtaagtcatgtttttaattataaagataatataaggccattggaggaaaccccgtcccccactgaagcatgaggtccgactcctgccgcgctgcttccttccctgtttttaaatgttctcatgtttcttcacacagtcgtaatcactgtgaatgcccaatttggggctctgctgtttctgtttcgtgtcataagcattttccctgttgctgcctcatcttcataatcatccttttactttcctgcacgatgttacccgtagatgtgccatcgtctacttaagcattctccttttattagacatctctgaatttctgctaactgcagtgctgtgaatattcaccacgtctcctgctactatttattgagggtttatgccatgccaggtgccgtgacacatgctttgaatacatgatttctagtcctcccaacacctccacaaagtagcgactgttgttccctaatcatagatgagagaggagtcttggagaaggtaaataagcagcccaagctcgcacagctagaggcacaggtgggactggaaccccaagctgacgtgcaaactcctttgagcctccttctctctacccgggagggtgggactggaaccccaagctgatgtgcaagctcctttgagcctccttctctctacccgggagtgtgggtctgctctgtgccttgagcagaggctcattctgcgttcattcacacattcttccacccacacttagtgatcaactgcagtgtgccaagcacaccccttctcacggctgagaagcggcagtctggattcaaacccgtgtctgtgggactcgtttaccatcaggctatcttgcctctcccttcagccctccctggttggctgtgcccccaagtacagcacaggggactccacagccagtgtgttacaccaccaggctatcctacctctcccttcagccctccctggctggctgtgcccccaagtatagctcagggggagcaagccccacgcccacctcaacactcaagggtcagaatgagaagtgcaaatctaagtcctaggggaaggatcgatgattatgaacgtcaataaagggatgactgggcgggcacggtggcttatgcctgtaatcccagcactttgggaggccaaggcgggtggatcacctgaggtcaggagtttgagaccagcctggccaacatggcaaaactccgtctctactgaaagtacaaaaattagctgggtgtgatggcaggcacctataatcccagctacttgggagaatgaggtgggagaatcgcttgaaccctggaggcagaggttggagtgagtggagatcgcgccattgcactccagcctgggaacaagagcaaaactccatctcacaaaataaaaataatttaaaaaataataataataaaggacatgactccctggaactagatcatgtttgagatagttctgaggcagagatggcaataataagcacacatgcttctgcctgtcgtcctttgcgatggcagacattactaatcacatatgcctctgcctgctgtcctttgccatggcagacatcactaatcaactagggcacactttcttgctagacttggatgtggctttgtaatcctccacccagtgttgacccatgtgaccactcttgataagaggtggcatttggaataacacctgtattccattgctagcctgaaggatattgaacacggatagtctagaagggagggaggggattgtggtggggaataggaaaatgtgagcccagccaggaaggcttcgctcttcttgatacctaagtggtttgggatgtttgacaacatgagtcatctgggccagaagcctggtaaggtgaaggggcggagttgctccctgcgggcggggcggaccccagaacccagctttcatcactccagtgtgtgtttcccaatcaggctcctcaggagcagggatcgttcttgcttctggcgagttctcagtcaacccctgtcagtggttctgtggttctggacccaagagttgaggctggaagagccaggctccctctggctcatggctccctctggctcgtttgcaggaagcaccagcagtatgactgtaagtggtacatccccctggccgacctggtgtttccatcccccgaggagtctgaggccagcccccaggtgcaccccttcccagaccatgagctggaggacatgaagatgaagatctctgccctcaagagtgaaatccagaaggaggtgagcagagcttggtatctgagcctggggccctttgagccagctgtgttgggggaggtggaggcaggaagttgtaaggtttgagactttgagagggagccttgagtgtgtagttactaagggaaagaccccgactacagtagctccaagcagatcgagggggtcagtgctcaggatttcatagggctaacatgggaagtgccctggaaagcagtgcatgttgaacacgatagaaaggggaagcaagtagccaggcgcagtggctcacacctgtaatcccagcactttggaaggccgaggcaggtggatcacctgaggccaggagttcgagaccagcctggccaacatggcaaaaccctgtctctactaaaagtacaaaaattagcagagtgtggtggtgggcacctgtaatcccagctactcgggaggctgaggcagtagaatggcttgaacccgggaggtggaggttgcagtgagccaagaacatgccaatgcactccagtctaggcaatagagtgagattctgtcaaaaacaaaaaaaaaaagtggaggtagagggaagcaagagaagaaaaagcaggcttttgtaaggaaaagcaggacctgtgcaaggaaaaggacctgggaggcctctcagaaactgacagatcaagtaggcaaataaataaggagagagaggacctgaatgccacaattaacatgcttgacttaaaaatgcagagaagcttgtgccctgacagaaaactgagattcttgtcacacacgtttgggaccttcacatttatcctataataggccactaaggaaatctcaaaatttttctgcaagttgatagcatacaagtcatgttcacagaccacagtggagtaaaattagaagtgaacaagaatattggtcagcctgggtgcagtggctcacacctttaatcccagaactttgggaggctgaggatggtggatcgcctgaggtcaggaattcaagatcagcctggccaacatggtaaaaatccatctctactaaaaatacaaaattatccaggcgtggtggatcatgcctgtaatcccagcactttaggaggcccaggcaggcaggtcacctgaggtcaggagtttgagaccagcctggccaacatggtgaaaccccatttctactgaaaatacaaaattagcctggcgtggtggcttccgcctgtaatcccagctactcaggaggctgagacaggagaattgcttgaacctgggaggcagaggttgcattgagctgagattccgctgctgcactccagcctgagcaacagagtgagactgtctcaaaaaaaaaaaaaaaaaaaaaaagcattggtttggaaagttcaaactgacaaggtaaagaggaaatcaaaattcaaaatgagaactgcaaactgtttagtgctgtctggaaatgagtgtactacataccagtacccatggatgcagccaaagtgctgtttagaggaacatgaatagccctcagttcacataacaacagtgtctagaggaacatgcatagccctcagttcacataacaacagcgtctagaggaacatgcatagccctcagttcacataacaacagcgtctagaggaacatgcatagccctcagttcacataacaacagcgtctagaggaacatgcatagccctcagttcacgtaacagcagcgtctagaggaacatgcatagccctcagttcacgtaacagcagcatctagaggaacatgcatagccctcagttcacgtaacaacagtgtctagaggaacatgcatagccctcagttcacgtaacagcagtgtctagaggaacatgcatagccctcagttcacgtaacagcagtgtctagaggaacatgcatagccctcagttcacataacaacagcgtctagaggaacatgcatagccctcagttcacgtaacagcagcgtctagaggaacatgcatagccctcagttcacgtaacagcagcgtctagaggaacatgcatagccctcagttcacgtaacaacagtgtctagaggaacatgcatagccctcagttcacgtaacagcagtgtctagaggaacatgcatagccctcagttcacgtaacagcagtgtctagaggaacatgcatagccctcagttcacataacagcagtgtctagaggaacatgcatagccctcagttcacataacaacagtgtctagaggaacatgcatagccctcagttcatgtaacaacagtgtctagaggaacatgcatagccctcagttcacataacaacagtgtctagaggaacatgcatagccctcagttcacataacaacagtgtctagaggaacatgcatagccctcagttcacgtaacagcagtgtctagaggaacatgtatagccctcagttcacgtaacaacagtgtctagaggaacatgcatagccctcagttcacataacaacagtgtctagaggaacatacatagccctcagttcacataacagcagtgtctagaggaacatgcatagccctcagttcacataacaacagtgtctagaggaacatgcatagccctcagttcacataacaacagtgtctagaggaacatgcatagccctcagttcacgtaacagcagtgctagaggaacatgcatagccctcagttcacataacaacagtgtctagaggaacatgcatagccctcagttcacataacagcagtgtctagaggaacatgcatagccctcagttcacataacaacagcgtctggaggaacatgcatagccctcagttcacataacaacagtgtctggaggaacatgcatagccctcagtttacataacagcagcgtctagaggaacatgcatagccctcagttcacgtaacaacagtgtctagaggaacatgcatagccctcagttcacataacagtgtctagaggaacatgcatagccctcagttcacataacaacagtgtctagaggaacatgtatagccctcagttcacgtaacaacagtgtctagaggaacatgcatagccctcagttcacataacaacagtgtctagaggaacatgcataaccctcagttcacataacagtgtctagaggaacatgcatagccctcagttcacataacaacagtgtctagaggaacatgcatagccctcagttcacataacaacagtgtctggaggaacatgcatagccctcagttcacgtaacagcagtgctagaggaacatgcatagccctcagttcacgtaacaacagtgtctagaggaacatgcatagccctcagttcacataacagcagtgtctagaggaacatgcatagccctcagttcacataacaacagtgtctggaggaacatgcatagccctcagttcacataacaacagtgtctagaggaacatgcatagccctcagttcacataacagcagcgtctagaggaacatgcatagccctcagttcacgtaacaacagtgtctagagcaacatgcatagccctcagttcacataacagtgtctagaggaacatgcatagccctcagttcacataacaacagtgtctagaggaacatgcatagccctcagttcacataacaacagcgtctagaggaacatgcatagccctcagttcacgtaacaacagtgtctagaggaacatgcatagccctcagttcacgtaacagcagtgtctagaggaacatgtatagccctcagttcacgtaacaacagtgtctagaggaacatgcatagccctcagttcacgtaacagcagtgtctagaggaacatgcatagccctcagttcacgtaacagcagtgtctagaggaacatgtatagccctcagttcacgtaacaacagtgtctagaggaacatgcatagccctcagttcacgtaacagcagtgctagaggaacatgcatagccctcagttcacataacaacagtgtctagaggaacatgcatagccctcagttcacataacagcagtgtctagaggaacatgcatagccctcagttcacataacaacagcgtctagaggaacatgcatagccctcagttcacataacaacagtgtctagaggaacatgcatagccctcagttcacataacagcagcatctagaggaacatgcatagccctcagttcacgtaacaacagcatctagaggaacatgcatagccctcagttcacataacagtgtctagaggaacatgcatagccctcagttcacataacaacagtgtctagaggaacatgcatagccctcagttcacataacaacagcgtctagaggaacatgcatagccctcagttcacgtaacaacagtgtctagaggaacatgcatagccctcagttcacataatagcagtgtctagaggaacatgtatagccctcagttcacataacaacagtgtctagaggaacatgcatagccctcagttcacataacaacagtgtctagaggaacatgcataaccctcagttcacataacagtgtctagaggaacatgcatagccctcagttcacataacaacagtgtctagaggaacatgcatatccctcagttcacataacaacagtgtctggaggaacatgcatagccctcagttcacgtaacagcagtgctagaggaacatgcatagccctcagttcacgtaacaacagtgtctagaggaacatgcatagccctcagttcacataacagcagcgtctagaggaacatgcatagccctcagttcacataacaacagtgtctggaggaacatgcatagccctcagttcacataacaacagtgtctagaggaacatgcatagccctcagttcacataacagcagcgtctagaggaacatgcatagccctcagttcacgtaacaacagtgtctagaggaaggcaccacgggaggagcatccctgtgagtggaggaagggcctggagcggtttggtcagcttggtctgttttcctcacctctcaggttcagcttaggcctcaccacccctgggaagcttctctgacacccacgcccaccacagtcttggttgggtgccctgtccccagatcctgtggctttttgttcacctgtggctttgcttaaatggtactgaattgtaattgcattgtcagactcctctcttccccactggaatttgaactccagggacagcgctattttcttctgttccatgttcctcatattcgacacgtagaaaacaggtggttagggcccagcatggtggtttacaccggtaatcccagtactttgggaggctgagacgggtgggtcacttgaggccaggagttcaagaccagcctggccaacatcatgaagccccgtctctatgaaaaatacaaaagttagccgggtgtggtggtgggtgcctgtaatcccagccacatgggaggctgaggcaaaagaattgtgtgaacccgggaggtggaggttgcagtgagccgagatcacgccactgcactccagcctgggcaacagagtgagtgggactccatctcaaaaaaaaaaaggcacttagtaaacaaacaattattgaagaaaacataaccagatggcctctctgaggatcctttcaactcaagcatctccctttgaacaggggaaagcaagatcaccattacagccccaggagtgttcagggctgggggatgtcctaggacagagggtccaactggtggtacatctgcccagagggcttcctcgccagcacagctgtccccctcctgaacggctgggccctgcccacagtgcccgcccaggagcatcctgcgtgcctgtttcccacccgcccctgggaggcttgctgcctccccgttgccccagctgtgcagacgtggccttgtgcccagtcgagtcaacagtcaacactcagtgagccccactggctgtgctgcctggggtgtgccgggtgcctcatgtatatccctgtccagtggaggaagcagacacgccccttgctgaccacagagtgtggtacatgtgagtcactggagaggcacaggtgccgtcctctgagtcacagaagaagcagtgatttgttttttgttttttgtttttttttgagatggagtctcactttgtcactgtcgcccaggctggagtgcagtggcacaatctcggctcactgcaacctccacctcccgggttcaagcaattcttctacctcagcctcctgagtagctgggaataaaggcgtccgccaccacgcctggctaattttttgtatttttagtagagacggggtttcaccgtgttagccaggctggtctcaaactcctgacctcatgatccacccgccccggcctcccaaagtgctgggatgacaggtgtgagccaccgtgctcagccttgttctcttgataataattttttaaattttcatgttttttctaatccccaatataatactggctggttttaatgagaaatgctcgtagtaccagcatgtacagggtaaagctggtcgccactcacctcccactgctgacagtttgaggtgtattcttctgaactcttctttgcttatgctggtgtgcgcccgcgtgtccaatgagactagactacacgtgctgttttgcaacttcagcattttactccacagtgggtctttgagccctttggatgtatcagattctttttctttctttttgaggtagagtctcgctctgtcacccaggctggagtgcactggtgagatttgggctcactggaacttccacctcccgggttcaagcgattctcgtgcctcagcctcccgagtagctgggattacaggcgcccgccaccacgcccggtagtttttgcatttttagtagagacggagtttcaccacgttggccagggtggtctcgaactcctgacctcaaacgatccgcccacctcggcctcccaaagtgctgggattacaggcgtgagccaccgcgcctggcagtatcagattctttttaacaactgcctcctgctctgtcgcttggctgcatacaaatgtttttgggtgtttggattgtctctgattcttcgctcttagcaggcaagtcaacagtaaacatcactgcgcaggtgcctctgcagtaggttccctccaggtgggatgggcagggcagggtgagtgtgcgcttaattgacaggcttttacctctgaaaaagctgtgactggtggcattccccctgcggtgtgtgagggtgactgtcccccacagtgtcacaacactggctgtgaacattctttacaattttgccagtccagtgggttaaaaagaacaaaacaccatagaggtgaattctaactgaggagcttgaggatggccttgggagctgagacttgaagcataatggtggttaataaaagggagggggtcctttacgaaacagacagaaacttggaacattgagggagcaggctctgcccgcagaggatgaatgtctggtgagagggggaggctgagccgacgggacctggtgggttgtctgccgggcagggaggctggaaccctgccatgggggccttggtgccaggctagcaggtggggcttcaggctgaaaggtgtctgaggtttctttaagcaggtgtctctgttgtacccaggatttaatgtgtagaggcagcagagtgacagtacagagaggttaatactactgtaatatttgtattatttagggttctcaagagaaggaggcatagcaccccgcccagggccacgtggagaggtgccagctttgaacaggaggcaggaatggaaagaaagtgtggccacagcttttctgtggagaaacagggcagggaaagggcttggcaccagctggcttccgttatgtcggcagccctgggctagaggagtggtctctggtgacctggtccctggccctgggtgacgtggggcagaggagatgctggcttggcgagtgagcgtcaggtagagaaggtggttggggacatgggctctggatcagtgggtgtgtgtatgaaagctgtgctcatagggcatcactgacaggcttaggaattagtgagccctgtgggggagcagtttctcacccagctacccgcctctcctgccacaagatgtcaaaacatcacgaaatacggaaaatgtaaagagcatgttaacacacagtggagtgtcgtgcttagtgctgctcgtgagaaaggcccgagtgtgaggggaaccctctgtgtccccatctcctgcagaaagccaacaaaggccagagccgggccatcgagcgcctgaagaagaagatgtttgagaatgagttcctgctgctgctcaactcccccacaatcccgttcaggatccacaatcggaatggaaaggtcaggatgggtgggggtgggaccaagacagccccttccttagtccagagcagcccactctgtggctcctggccctgacctgtacgaaccggaaactcaggccccctcttcctgaggaggctgccatggctccagctgttgactcgctctcccctctcgtgtggaatgagtgccctctgctggccgtccctggcacagccgctcctgtcaccttggcttcccaggaaggagctcccccttcacccacccacccccagctgcctcctcctgcaaggtcagctgtgcctggataaggaggagctttgggccgggcacagtggctcatgcctgtcatcccagcactttgggaggctgaggcaggcgaatcacctgaggtcaagagtttgagaccagcctggccaacatggcaaaactctgtctctactaaaaacacaaaaattagccgggcgtggtggtgggcacctgtaatcccagctactcaggaggctgaggcaggagattggcgtgaacccgggaggtggaggttgcagtgagccgagattttgccattgcactagagcctgggcaacaagagcgagactctgtctcaaaaaaaaaaaaaaaaaaaagataaaaggagctttgttggggtccccaggatctgggagtacgctttgcctgactgtggtcacccactttatgcttatctcctctcttcagagttacctgttcctactgtcctcggactacgagaggtcagagtggagagaagcaattcagaaactacagaagaagggtaaattcctgcctcttccacgctccccaatgatgtccgtggcattgatgggccttttgtatttctaagcgtttcatgtccagtatcacgtctttggccctcgcagtcaccctcagaggtgccagggtgagcgtttaaggatgttacggattaattgagacccaaagaatctaactgattggctgaaagacatgatgatttagtcctgggactggacccagagcccagcctgggctttctctctctctctacctctctctctctctcacacacacacacacagagacacacacacacacacacacacacacatacacacatacacagaggctgggtacggtggcttacgcctgtaatcccagtcaggagtttgagatcagcctgggcaacgtggtgaaaccccgtctctactaaaaacacaaaaattagccaggtgtggtggtgggcacctgtaatcccagctactcaggaggctgaagcaggagaatcccttgaacctgagaggcggaggttgcagtgagctgagatcacagcactgcactccagcctgggcgacagagtgagactccgtttaaaaaaaaaacgaaaacaaaacgcatacaccacacacacacacacacacacacacacacacacacacacacacacacacacacacacaaacctcttcagttagattctcctactctgacccctctcgcagcatctacaccagtcctgctgtgtccacaaatccttccccctccctcgcaaggaccaagtctgccccagggattaagccgtcttcctgcagcagcccccagggaagagcagccggtcctggtggaccagtgcccacgctcccttctctctcggctctccctccagatctccaggcctttgtcctgagctcagtggagctccaggtgctcacaggatcctgtttcaagcttaggactgtacacaacattcctgtcaccagcaataaagacggtaagctcgggaaccagaggtggcccaaccggcaggtcccagccctcagagcgtggccggcttcccgtaaggactcagacagacatgtggctgtaaatggctgatccctgctcggctgtgctgagactgttgagtggccaggacacagcttgggtaggggtgactgtctactgagttcccagatgaccccagcttttccttgggcccctctgtctggcttgggagaactggcaccctggtgcactgagattgtgctgttaatatattcatgagagagcagacccggtagataaaatggtgtatgggaaatgaggctggaagtttccagggaccagctcttgaaaggccttgaatcccaagcaagggagtttggaattcatgctgtaagcccgggagtctgggggggttttgagcagtggggagctgtgatcagggctgggaactgaccggagtgggtgtattctagctgcctgtgtgctgggaaagggtccactttgtgaacggggtcctgaaggcaagctttcctcgacataaatcattagcagaatgatttatcatattggtcagttttcagtgccaggataggcaggatttggagggagagacagtacccatggggaatggtactaagtccctgggccaggatggtgggtgtgctggacccccccaggctgagtggaggagagaaggaccccctagccctaccccgggcagctcacatataaggccgccgtggccttcggaaactttttcatctggccaccaggtggtgatgttggaccaagactcagctgagtctcataccccgtctgcctcccgccggcctggggtggaggctgaggggatccgctgaccaccctctgccctgggggcttttctctcttgcagacgatgagtctccaggactctatggcttccttcatgtcatcgtccactctgccaagggatttaagcaatcagccagtaagtgccctggccaggacgaggttgggtgggccattgtggattctgcactgctctgcccaggatggggccctgccagcacgcctttagacatggggcattcccctggaggccagaaaccagctcctcttggcagggaggtcacccctggcctttgtctccaaagtcctctttctcaagccctccctgaagctgtctgaaacctaggggccgggcgcggtggctcacccctgtaatcccagcactttgggaggcccaggcgggcggatcacgaggtcaggagttcgagaccatccgggccaacatggtgaaaccccgtctctactaaaaatactaaaattagcgtgggcatggcggtggacgcctgtagtcccagctacttgggaggctgaggccagagaatcccttgaacccgggaggcggaggttgctgtgagctgagatcatggcattgcactccaccctgggcgacagagcgagaatccgtctcaaaaaaaaaaaaaagaaaccgagtgcgacaaacacgtggactccaacttcatatctgagggcgacaaacacgtggactccaacttcatatctgcccatgacaagctgtgtgaccttgggcaagtttcttaacctctctgggcctccactaaaaggcagtcacgcttgtgaattttgacccgagagcaggctgggatatgatcgtgtgtgtgcaacgctggtgtgctgccacgctcatcgctttttctccccttcccccttgtgggttcctcatactaaatctgtttttagtgtctcacaaagtaggattgcactttttaatttttaaaaaatttttttttagagacaggttctccccatgttggccaggctggtcttgaactcctgggctcaagccatcctcccacctcagcctcccaaagtgctgagattacaggcgtgagctgctgcgcccggcctggttgcgctttttatctacctgttatccacacgggaatctgtgagtcagttagacagctaatagtttctacccatttgccagaggaggtaaccgagtcacagagaggagaaaagacttaacatcacagaggatcagaaaccctgactctctccctctccacctgcccctcccactccctgctcttcactggcaggtggggtctgccctcacccctccctgcagcgccccacacagaggtgactccccgggccgttagagcagcctttcccaggaagcctccctgagttcctgggggcaaactggcctcccttctttgtcccttctttgtgcccacatcccctcaggttccttgtgcccccatcccctcaggttccttgtgcccccatcccctgaggttccttgtgcccccatcccctcaggttccttgtgcccccatcccctgaggttccttgtgcccacatcccctgaggttccttgtgcccccatcccctcaggttccttgtgcccccatcccctcaggttctttgtgcccccgtcccctcaggttctttgtgcccccatcccctgaggttccttgtatccccatccctttgaggttccttgtgcccccatcccctgaggttccttgtgcccccatcctgctcagggcaagctggttatggcacctgtcatgctgttttgtcacttaacaatttgcgtctcccactgtgagttctctgagggcgggaaccaggtctcctttaccctgggatgcatgggagctcagaaatgtggaatgaagtcgttaatttacacagcacctaccgtgcacctggagaaggtgagaacatggctggcgtgtggacgtactcacatgtgcaaagcctgtggcgtgttcagagcctctcagtctcacggtccgctctgagcctccggcatcccgccgaggtcacggaaaccatccctgttttacacacgaggacgccgaggctcggaggggctcaaggttccttcctggagtcacacagtagcaggtggtgcagcagaatccacgtcttccggcaccagagccggagctctaaccttttgggcacttctcgatgtctggccgggaacaccacacggtccctcaggctgcttgttaccgtggaagcttcctgaactctctccagacccacagacctcccttcttgggggctgccgctgaggagcttctggctagtgagctctgaagcactgtcccacccatgtctggaccaggcgccaccactccatgtccccagatgccgcccctccctctcctgcttcccgttggccgggaggtcctcgcctcagggagccgacccgtggcctcccagcctgggcgggtgtcagagccggctgagctgctccaaaatctctctttacccccagattatcctcactcccttcgccgccgccacccctgacccactcatatgtctgttctcactcagaggtgaggccctgtgtcttcagccgtggtaaactcaggacctctggacaggcaggcccagggtgtaggcaccatgacttttcctgctgtgcagacaggaacctggggagagaagggaggtgatctgtgcagagctggggtgtggacccagatggtctgactccggaaccctcgctctgaccctgtgagccgtccccagctccttccggaaccctccctctgaccctgtgaaccctcccccagcccgttccggaaccctccctctgaccctgtgagccctcccccagccccttctcgaaccctccctctgaccctgtgaaccctcccccagccccttccggaaccctccctctgaccctgtgaaccctcccccagccccttccggaaccctccctctgaccctgtgagccctcccccagccccttccggaaccctccctctgaccctgtgacccctcccccagccccttccggaaccctccctctgaccctgtgacccctcccccagccccttccggaaccctccctctgaccctgtgacccctcccccagccccttccggaaccctccctctgaccctgtgaaccctcccccagccccttccggaaccctccctctgaccctgtgagccctcccccagccccttccggaaccctcgctctgaccctgtgacccctcccccagccccttccggaaccctccctctgaccctgtgagccctcccccagccccttcctgaaccctccctctgaccctgtgacccctcccccagccccttccggaaccctccctctgaccctgtgaaccctcccccagccccttccggaaccctccctctgaccctgtgaaccctcccccagccccttccggaaccctccctctgaccctgtgagccgtcccccagccccttccggaaccctccctctgaccctgtgaaccctcccccagccccttccggaaccctccctctgaccctgtgacccctcccccagccccttccggaaccctccctctgaccctgtgacccctcccccagccccttccggaaccctccctctgaccctgtgacccctcccccagccccttccggcaccctccctctgaccctgtgaaccctcccccagccccttccggaaccctccctctgaccctgtgagccctcccccagccccttccggaaccctccctctgaccctgtgaaccctcccccagccccttccggaaccctccctctgaccctgtgagccctcccccagccccttccggaaccctccctctgaccctgtgagccctccccagcccctcgaggaggggctcacaccgagatcaatccatgatgacagcacttcatggcccgtctcaaacacacaggcccactccctggtctggcccaggctggggtgctcagggcctctgtgttgttcacctgcaaatccccagccccgttctgtgtgttctgaggcccacctgggtcttctttctgttgctccagctggaggcttcttggggtagctgcactgtcctttctgcaggaaagctggtttttttggtttttttttttttgagaaagagtcacttggtcgcccaggctggagtgcagtggtgccatctcagctcactgcaacttccacaccccaggttcaagcgattgtcctgcctcagcctcccgagtagctgggactacaggcatgtgccaccacgccgggctcacttttgtatttttagtagagatggggtttcaccatgttggtcaggctggtctcaaactcctgacctcaggtgatctgcccaccttggcctcccaaagtgctgggatttacaggcgtgagccaccttgcccggccaggaaagctgttctgatggagaatggcccagctgggcagctgcaggggctaagtggagtaagccacctgcactgtatgcccgcactgtgacctctgacgttgtttcacgctgcagagggttggccatagtgtcccaaaggcacctcccacaccacctctggtaccctgggaacaacctcggcatctccctggaggtgggaggactgctggggtccgagcccagggcgggtgtgggtttgcagagggcctggggtccgtgccggtgctgtggcctcagcagttgggtcccaaggtagattttcagcctgaaggccagggtggaagatggaaatgccggggaaagcccccggccctgccctcccgccccagccctccactgccttgttacctggagcgcttggtggtggtgggagcctcgttcaccgtgtgccagctgggttcccagccctgttcttggtactgcgggtacaccggcaggcaggaaaacccaggcttctctccacatggtgtttacgtcgtggggggagagagactagggacgcacgagtagagaagatccctttggtttatgttaagtgcagcggaggaaaccacagcaccctgggcttggggatgtgggcgttgttggtcgtcaccgcggcaggggatgctccgagcattcaggacccagaggcagggctgctaaacgcctcccaccccaaatgccgctgttgaggcctgggcacccatgttacggggagaggtggctccagggcggtcagtgaagagtttgtggtgtcgtctccatggtgaggaagatgtggagacggaacagtcaagggccctttagagggaggaggaggccagagtgtggggagggccgaggtgggaagggcagagtgtggggagggccgaggtgggaagggcagagtgtggggagggctgaggtaggaagggcagagtgtggggtgagccgaggtggggagggctgagcccctaagaagggggcaggggagaagccagatggtcccgggcttcagggaggagagagccaagatgccatccgtggggacgttggaaaggacagatgcgatgtccccctccatcctgagtgccgccccagctgccccaccctggccccactcactcagtatctccgtctgtccttcccccacagacctgtactgtaccctggaggtggattccttcggctattttgtcagcaaagccaaaaccagggtgttccgggacacagcggagcccaagtgggatgaggtgagtggcaggggctggcatctctgtggggaccccaccaccccgtgctcgtggcttgtctgctggggacggccagcccattggttggaccagctatgtctgcacccccctttctgctccctgctcctctggcttctgatcgcggtgtgtgtctgggtgtcagaccctgtggtgtcagctcaggcccccagactccaggggtgatgggaggcctctgggagctccagaaaatctgacgtgtccttcgtgggccgtgcttactccctcctccttgcaaagctgaggcacgcacctgccggaaagccaggcctcccagcttcggaggttcagggccctttgtcccatctttccccaggagtttgagatcgagctggagggctcccagtccctgaggatcctgtgctatgagaagtgctatgacaagaccaaggtcaacaaggacaacaatgagatcgtggacaagatcatgggcaaaggacagatccaggtgaggccagggcgccggggcgaggctgagggagcctccaggaggtggttccagttgaaaaggaattctggtcaaggagcctgctctttcgtgattttggttccaagctggttggaggaaagttcccaggaggtggttctcccctccctgctagaggtggctgcctgttgtggccccggaagcccaggcgtgtgcgtggctcctcaggtgggtcatctgcgcttctgcaagatggaaacaaccagctttgttttcacacgccagctttagtctatgggtggttgtttcccggaacgccatgttgagaaggactcagaggctgcgtcggtgaacgggagggaggaatgctgtgtgtgaggagccgtgtctgccattgacgggggaccggagttaggcacacggaccaggcgtttgctcttctgcccgaaagacttagggtcctgctggttggcttggggggaggggggtctctgacttgttgttagggtggccggaccttactcagctgcgttgggagtctgtggcttcgggtggggactctgggtgttagtagaggctgcacctcgggttaagggtatttatgcttctgggtgcggtggctcacgcctgtaatcccagcaccttgggaggccgaggtgggtggatcacgaggtcaggagttcgagaccagcctggccaacatggcgaaaccccatctctactaaaaatacaaaaattagcaggtcgtggtggcgggcgcctgtaatcccagctactcagtaggctgaggcaggagaatcgcttgaacccaggaggtagaggttgcagtgagctgagatcgcgcctgggtgatggagtcagaccgtgtctccaaaaaaataaaaataaataaaaacagcatttatgcctcaactgtgcttttggctccctataaacatatatagggaaaaggcctctgtgtgtgcagcctgtgtctctgaaacattctgccaattttgaagatggctgctattcaccaacctattaagagaagtaggcttgggagcgggaaaaggcgtgacgtggtggagccgctcacactcccgtctggtacctcgtgtggcctcgtgctgtgccgcaagtggtctggtttgggggtagattctgtgaccatgaaatgaagggagacggtaactgacccgtactgaggttgagcctcgggcgttgggcgtgctgagcttcttgacagtggccgcagacgtgatccaggcacagctgggcgccgagcttcttgaccgtggccccggacgtgatccaggcgcagctgggcgccgagcttcttgaccgtggccccggacgtgatccaggcgcagctgggcgccgagcttcttgaccgtggccccggaggtgatccaggcggcagctgggcgccgagcttcttgaccgtggccccggacgtgatccaggcgcagctgggcgccgagcttcttgaccgtggccccggacgtgatccaggcgcagctgggcgccgagcttcttgaccgtggcccaagaggtgatccaggcgcaggctgcgatggctccgtctacaacagggagctgaacgatgctttttagcaggaagcatttgttctctgatgcattgtcatggccaccgagtttggtatctggctcttacctgcaggtccttggtagcattgcccctggggagctgtgtgggtctcccactcgctgccccatctcaggctccagtgtttgaaccaggggccccacgtggaggggcctggcctctgccgcatacgccccgtgttcctaaacacgtctctttccgatgctgtggggtctgcaccctgcttctcagtactcgtcactagggagacagggctgccaggcaactgccagccagtccttcgtgatttaggaaatgggctctagagattcagtccctgggacctgctctctgtggggataaggggagggagccccatctccctgtccctgggctgggctagagggacaggcacggaagggttctgggctggcctgtgcagccccaggagacgcccaggcaagagacgagtggtcgccacgccacactccctgggccactggtggctgtggaatagaagagttacaaggatgtgccgggcagccagccccgtgggcacggtgggccccagcccctcgagaactcagctcccaaggcccgagggcacattcccccacctggacttcagccccattgcttccctccttctcactcagctgcacaagccccgggggaaacacaccatcagtcactgcaagcctcttggagacaggagcagatggaggcagtgggggagggaggaagccaggttatgtttggcaaagcagaaggcagagtctggtaaggaaaatgtttctgtgtttaagcttcgaggaatgttaaatgcctgggagttgatattaaaagaaacataaaccttcctgctgccagctgacctgggcctgtgagcggacagttcagagccagagtcccctgcaggcctttgaagtcccccagcactcagcatgccaaggcccggccctggccctccgctgcagaaccatctcaccagcctgcctttggtgggggaggcatgccccaggggcgggctgtggcttagaaagtctcgccccgtgactgccctcagagccaccgtggatggccaggctgggtgacgagtccacacggagctgttcccacgaacccgggccccacggagccacggaacggtctgtccccacagcttgtctctgccttcactccggccacacatctaaggaagggagctggcactagcctctggaatgcagtctttctgcccgccagcaggcgctgaggacatagtcggaggtggctttgagatagggcccagccctcggggatattcagggggcctgtaggaaaggcaggaggaggagggcagtctctgaggcccccacttctctctaagccccctcccagcagcccatccagagaaagcaaggggccctacggcctaagcgcaggcatttgctgctgtgatgaggcccccactctgggtcgcctgatggggcagtggggcaggagtctcagcggcggggtggggtgggggaagcatttagtgacagacagacggcagcatgcgtcaccaatgtgtgtccagcacttgtgctcctggaggccgcttcccaaatgccatctcctcgtgtgatccttgtcgtgatcctccagggagaatgacagtccctcctccccatcttacagatgaggacactggggtactgaggttaagtaccttggccaaggcatctctgcgtatggtatgtgggaaaggccatgttccctcctctgtgccatgtccccacgtctcaggcctttgtcaacgaatcccccagcccggacagagggccgtggcatggctaatggcctggagaagcagctgaggtgctgctttatggcataaggtgagcgtcctttgtcttggagtcctctgggcaggggacacttgtgcctggtgcccctgggaggaaggagaggagcacgtgcgggaaagagcaggaggccgaggtgggctgatcacgaggtcaggagttcgagaccagcctggccaacatggcaaaacccctttcctactaaaaatacaaaaattagccaggcgtggtggcacgcgcccataatcccagcactttgggaggccgaggcgggcggattacaaggtcgggagttcaagacccgcctggccaacatggcgaaaccctgtttctactaaaaatacaagaattagctgggtgtggggcccacgcctgtaatcccagcactttgggaggccgaggcgggcggattaggaggtcgggagtttgagactcgcctggccaacatggcgaaaccccgtctctactagaaatataaaaattagccaggggtggtcgtgcgtgcctgtaatcccagcacttcgggaggccagggcggggggatcacctgaggtcaggagttcgaaaccagcctggtcaacgtggtgaaaccctgtgtctactaaaaaaacaaaaattagccaggcgtgatggcgggcacctgtaatcccagctacttgggaggctgagggaggagaatcacttgaacctgggaggtggaggttgtagtgagctgagattgctccattgcactccagcctggacaagacagaatgagattctgtctggggaaaaaaaagaaaagaaaacagcaggaggggtacttagcatgcgtctgtgaggtccccagcccaggagggggtcctggcctccagggacccactgtcagattggaaagacgagtatattggtccatgttctccagtgagaagaatgctagatgtcagccacaatagccgtacacacataagcgagcccaggacgagcccagcacggtgctaaatgcttccatctgctgtctcaggagatcttcccaggaccctgtgggagaggaatatcatcacagctagaaagatgaggaagctggggctaaggagcccggacaaggccatgtgcccaggagtgggccagggcgggcagctggctgcagagcccatttctagatgtcctgctgcctcctgctataagaagacggaagattgtcctgctgtaagaagacggaagattgtcctgctgtaagaagacggaagattgtcctgctgtaagaagacggaagattgtcctgctgtaagaagacggaagattgtcctgctgtaagaagatggaagattgtcctgctataagaagatggaagattgtcccgcaggaattcagaggcagaaaggtcaccatgggctggaattagggaggcttcaaggaggaggtggaacgagagcgatttggaagccctgggttttttaattccaaaagcaatgtttgtatgagaaagaaaattgcagtagaagcaaagagacttgaaacctaatcagaaaccatccttcctccggctcctccgaagcagccagtttattctgtgccttttcccttcttgaggtatacacatttttatgtagatttaatcagggcctgttttgtctgtttttctgttttcatggattattataaacctccttttctctagagctgtatggagtcttcttaagcacctttttggatactttgttaaaagtactttatattctttgtagaaatcttggtatagagcggccagcgcaattgctatgctaaggctctgtgttattccagcaaggtgcgcaggctccgcttccgcagaagggagtagggtgggagttctggaggacagacccgcctggcagggaggcacgaatgtgaagggagggtcccaggaaagtcaggagcctcagcaggggtggcggggagctgcaagcaaggccagtagaaggaatgaataaaaggaggggattcctgggggtttggccggaagaggtattttttttttttttgagatggggtcttgctgtgctgcccaggctggagtgcaatggcgcaatcttggctcactgcaacctctgcctcccaggttcacgccattctcctgtcccagcctcccgagtagctgggattacaggcgcccaccaccatgcccagctgatttttattagtagtagtagagacagggtttcaccatgttgaccaggctggtctcaaactcctgagctcaggtgatctgtccacctcagcctcccaaagtgctgggattacaggcctgagccacggcacccggcctggaataaatcttagagggcgtttaatccaatcctgttttccggagagaaggaaatggacaccagcaagggtgagcgaggcagccgcggtcacagagcttgttagtgggtgaacaagggccccagactcagggaccccatccaggtccgcttagctgggagccccccctccaccggctcttgcccctgcccccggcgtagtctgccctggctcctggtcccaggggactccactgtgtttatcctactctatttccagccttgccgctccagctgcaacctacccgctagctgattagcatattcccagggtccggcccttcttggcgggctgggcctgaggagagcgctttcccttggggccccacagctcagtttctgccagcgtccccagactggagaagggcctgagaccaagaagctacttaaacctgaggggccctctgcaccccctgcccgccccccggccctgcgtcattccctcgctcaccgcaggctggggacagcccccaccccacagtccacctctgctccctgtgcctgggaggcagctccacttccccacgtgcctgccagggcagcccctccctgggcacagcagcgctgaagaccctgtggtgggaggggcaggttccaggccaggaagggagtgtgagccaccgcgtccggcctttattctttttaaagaaaaaatagtggtagaagccaggcatagtagctcacgtggtgtagctgtggactacttgggaggctaaggaggctagagtgagctaaggattgcgctactgtactccagcctgggtgacagagcaagagtctatctccactgaaaaaaataaaaaataaaagattgtagtgaaatatacataacataaagttaccattttaataaattttaggggccgggcgcggtggctcacgcctgtaatcccagcactttgggaggccgaggtagatggatcacctgaggtcaggagttcaagaccagcctggccaacatggtgagaccccatctctacaaagattaaaaaaaattagccgggcgtggtggtgcacgcctgtagtcccagctattcgggacactgaggctggagaattgcttgaacctgggaggcagaggttgcagtgagccaagatcatgccactgcactccagcctgggcaatagagtgagactccatctcaaaaaataataatttttgggtgcacagctccgtggccataggtggatttggtgctgtgcagccgttgccagtgtgcatatccagaacttgttggccctccccagccgaaaccccatccccattaaatcataactccccactcctgcacccttagcctccagtaaccacctgcctgctttctgtctgtacgaatttgtccagtctgggaaccttacgtaggtggaatcagacagcatttgtcctcctcatgtccttgagcttcacccatatgccgttgtgtgtctgaatttcctccctttctgaggctggatacaatttccctggatgtagatgccacgtctctttatctgcccgtccgtccgtggatgtaggtgccacgtctgtttatccgtctgtggatataggtgccacatctgtttatccatccatccgtccgtgaatgtaggtgccatgtctgtttatccatccatccatccgtggatgtaggtgccacgtctatttatccatccatctgtggatgtaggtgccacgtctgtttgtccttctgtctgtccgtggatgtaggtgccacgtctcttcgtccatccatccgtctgtggacgtaggtgccatgtctgtttacccatccatccgtccatggatgtaggtgccacatctgtttatccatccgtccgtggatgtaggtgccatatctgtttgtccacccacccgtggatgtagctgccacgtctgtttatccgcctgtccatctgtggatgtagctgccatgtctatttatccatccgtccgtggatgtaggtgccacgtctgtttatccatccgttcgtggatgtaggtgccacgtctgtttattcatccgtttgtggatgtagctgccacgtctgtttatccatccatccgcggatgtaggtgccacgtctgtttatccatccattcatggatgtaggtgccatgtctgtttatccgtccgtccgtggatgtaggtgccatgtctgtttatccgtctgtccgtccgtccatccgtgcacatttgggttgtttccacccaaaacgctcttgcctttcgttgagaaaaagaaccttgtccctgaggatggagacagcacagcctccttctctccagacccaagctctgtcccccacctgcctcccagctgtaatagatgagcaggacccgtgaccctagggcatgactggtcactattagtctcctgtagttgaagcacacagttgggccccctgcctcggccttctctccccctcccggccaagtgtccctgccccttgaccccttcacccttcttcctgggtcagctctttcctcccctggtcagtggtttaggtgcatcgaatgcagacgcagtcaccctgaggccgcgggaacaacctctggtcccttgacttcttggcatctcagtttcttcttttatttatttacttatttatatttatttgagatggagtctctctctgtcgcccaggctgagtgtaatggcgcagtcttggctcactgcaacctccgtctcccgggttcaagtgattctcctgtctcagtctcctggttagctgggattaaaggcgcccgccaccatgcccagctaattttcgtatttttagtagagacggggttttgccatgttggccaggctggtctcgaactcctgaccttgtgatccacccgcctcagcctcccaaagtgctgggatgacaggcgtgagccaccgcacccggccaagtttctttattgattcagtgggggtaactattcctaccccaccttcagcactggcttaaaggatctcacatacctggaagagccagtcggtgctgtgacgtgtgcgtccacgctttcacctgttcactcacttgtttctgtttacgatacatcctctgaatggcaggccctgggctgtgggtacaaagaatgaccaggacctcaccgtctggtaaagaaaacaagagaacttaggccaggcacggtggttcatgcctgtaatcccagcactttaggaggccgaggcgggcggatcatgaggtcaggagttcgagaccagcctggccaacatggtgaaacgccgtctctactaaaaatagaaaaatcagccgggcgtgatggtgcgctcctgtaatcccagctactcgggaggctgaggcaggagaatggtgtgaaccaggacccaggaggtggaggttgcggtgagccgagattgcgccattacactccagcctgggctacagagcgagactctgtctcaaaaaaaggaaaacgagaacttggatcgttagccagtgttgccggggttttgaggccagacagatcttgcggggctgagtctagctttctccatcgttagttgggagaacagagcgagtatctttgcctctgagcctcagcttcctgacctgtcagatgggctgtaagaggactgaatgtgagggtccatgaaaccctggacccggggcctggcatggagtcagtacgtggtttgccctaagctggcgggttcaggcaccctgtcccccacccccttccagtggttctgggtgtcacttgtccagcagccccctcctaaaggctgtcacctataagtggtcccctgggtcggggcctttggctggccgaggcagcattattttcttaagctgatggggtcagactggctttgctgaaccaacctcatagcaggggcggggaagtcaaggctggggccctcaatgccggctggcccgaggtttccctgccatgacccagcacggcagctctgagcttggcctggtgtggtcggaaacaaggggcctttgtcagcggctggggagcagcttctggtttcaattactctggagagcacgaggaagcttgcagagaacgtggggccggagcccgccagggcaggagtcaagggctcccctgccccacttccctccctctgacccccaaggggtgtcttgtccccattcgaccctgcctgagggtcctgcgcgtgcgtcctgggggccctgggttgtgagcccagagccccttccagctccggccccctctcgttcttcatagtggtactgggacccctcccaggaagatgatcgacggccggtaacgtgggtcctcagtgcttccccgttccaggcctcacgcgtgggccacactgaccacagccgggcccctggccctgagggaggccttgattcaactgggaaggaacacaggcctttccctttggttccatctctcccgtccccaacccctgccctggcactcacagcccccatagctccctgtcgtgggacaccggagtgacctctccctggaagatcagcccgcgtcggcgcccgccaaggccaggagtgcatgtcaggccccgcctcggctcctggcttaggagttccgcctccctgctgcttgccaccctcacagctggcccacgtggggctcttccctctgccgccacccccacccctgtgccagttccccaggcacatagggaccgtggaggctgagccccaggcctggttctacttcctgctgactctccacttcctcccagggccccgtgactgcagccattgtcctgctctggccctgcccaccccagctgtttcgggcacatttgttctccagcccagactcccacctgctgtccctcttcaaggcaggtctagacgcctggttctccttggagagtgggcagcagagactgtcctgggtgggggaagtcgggggagggtccctcgagagtgcctgccctgccgtcgaaagcttttccaaacgtggggcacgaacctctctcgtcagccctgctcagctgcctccatcgcccaggtgttcctgattttgggagcctggactctgcccagtggattctgggcaggaagcatccagcaggaagcagatggaggtgtgagtcggctccccccgctcccctccacccctgggaagtgccgcctcagcaggcaggcttggcgcccgctccccctgacccgcctctgaagggtgggcaccatgcagagaagccggtccagacaggacctcaggagccgatgcagtcaggccctgagaacatccagcctcccgacagaccaaaaaaaggtgttctcagctctgggtgccgggctcccagactcagaggcacgggacctgggtttgatcttagccggccaacctcgggtgacccttcagagagtgtcctctcgggtccgtggcattcagcgaactcgccgaggcgaaagccgcagacatagattcctccccgtgagccgctaacctccctgctggcggaggctgctgcttcctcctaggaatccaaaggatcagctccagggttgtcccactttccgtgttttctgaaagcttcaagagaaggatgccacagaagggttgccagagaatttcttgagttagggctgaggctgcagatgaatgctgagcgggggtcacctttagggtgggctctgctggcctccctcaagcctgcggccaccgcagactcacagcagcccctcgtggccagccccgcccttgccgtggcctgggggcgtggacattggtggtgctgggcgagggtctaagccccagtgtagcctgtagctttgggctggggcagggagggatgggcacaccgtgttcacgccctcggaggcaagtgctgagctgccctggcttcaggaaagaccctagcgcggctggagacgcaagatgacccagacacacccgcctgacccactagacaggtgctgtcccctctcgaggctgccagggcgaacccacagccactgagcaaaagccctgagtttcccaaaggagggagagaagcagagacacgactggagctgcaggttcagcgtctgacccagaggtgtccttacaaagcccctaatctctcagacccccacgtcccccaccccgagggagagcgaggccttcgggagaactgcctctaggagctgctgggaacctaaggtttgagctgtagatgcctgaaaggagggcggggcgctgaggtgtgcctcagattctgcctgtggggcgtgggaattccggggagggacgtgagccccaaggcaggcgaggggtggtggaaaagcaggtgtgagccagtgggccccacgtcccctcttcagccagggcgcctgctctctctgcttctgcttttatccgacgaggtgggcagggagacgtcggcataaaatttcatttggaaaaaacggcaggggtgcgtcctcagcagaaaagaaatctcaccggagaccatgtgtctgttccgagctcctgatttgacagctgtggaaactgaacccagagaaaaacacagccgttgagtccacaggtccctggctcccagggctttgcttctggccaccatgagctcggagcttgggtggaagggaggtgttcgggaatccagaatgaagaaagagcagggaggctcggcgaccccatcccaccttcaggcctcagcccctcctgcctcaggctgcaatttatggctgtgctgggagacccggccacaccccctccttcccgggaggaggagcaggcaagcagcccaggggggctccagcggtagggacagcatactgaggggccacgccctgcccactctgtccctgggtgagttttgttctagataagcaagatgttcccaaaggctcaagtgcatttttcacccttttccatgaccaaatgtgctgtgagaatcgctagggtttgccagggacgggctgtcgggacacttctcctgcagcagacaagctcttgggctgtttcagcctctcctccgtacctagaaccaccgagcaccctggcgacaccagcctgacgtggccagagagaggctggaggtcaggcagagggaggctggagctgtgtgagaagcagcacgtactcgggactgccctatgagccggcacaggcctttggggagttgggaggacagcaggttaccttgggcaggcctaggtctgggccgtagagcaactgatttcatcctgactgccttcttccttacactgtgcccatcttcaaccttgagcccaccctggacccctctcccagccccacctggatggatgggtgggtgggtggatggatggatggatggatggaaggatgggtgggtgggtggatggatgggtggatggatggatggatgggtggatggatggaaggaaggaaggatggaaggaaggaaggatggaaggaaggaaagaaagaaacaaacatagctcctagggtctaatctgccattggctgctgggtgactcctgtccccaggctgaatgcaggctctgaacattgcaaatacccagaggtatccgatgggtggggagaaaaacctagagtgagtctcagtgtctcattctgggaagacatttggccttccagtccgcaggttttggttagggtcggtacaggaaatggtcagaacacacagtaagaatgcagtgaccacagagccaccgagttgggggacactcccgtccccactcccccacagctgtccccggaacgtgccatcctcccgcccaactcgcacgccctgtgtgggcgctgggcaccccgggctcccatgctcggcctgcttgtctctctctcatcctggagcctgcacctgtctttgggcaggagccactggcaggctctctgcagcccccaaagcctcgggtccgccctgctctcctccagcaccttcttgccccccagcctcgggtccgccctgctctcctccagcaccttcttgtcccccagctctggtcctctgatgcccagccggtgccctgatcctctggtgctgagagagggagtgttcttggcagacctgagccacatcccctcggtccccatcctcagctgggtgccaggctcctcctgggctctggactctctgggcggcctcttggggctctccccgccccaactggctcccaggctatccccactggggcgcctgtggccttggtctagctggctgctcagaaaccccctctcctggagtcatttgcgctagcggataggacgaggaatcggggttcaagtgtgggctgggggagaggagcgtcgttctggtgggaaaaaggaggtcactccaggaaagcggcagctgcatttctaggttctgaggcagaaccttcctcctggtgctcacaggctggaggatttgcctggaagccgtccccacccccagctgtcaccgaggcagccccactgcagcctttgcccctcccgctcgcacagggcaggatgtgaccttttttcctcgttgatgccgccactgaacaccttaacccgattttacctcagtcacagctgtgctgggtggcatgaccccctccctaggtgtaatgcggggtcccacccacgtctccccggggacagcccctctcactccccttgcagagagcctggggaggggctgagggaggatgggatggtccactaggaatgtttttaattccaaaggcagtgacatctgttcgtgggggccttaccaccaggctctgtttatccagccgggggagtcttgcaggtcgtctgaggagggctctggcaggtgtgggggatggaaggggtggggggagcaggtgtgggggatggaaggggtggggggagcaggtgtgggggatggaaggggtggggggagcaggtgggggtagaaagggtggggggagcaggtgtgggggatggaaggggtggggggagcaggtgtgggggatggaaggggtgggggaacaggtgtgggggatggaaggggtggggggagcaggtgtaggggatggaaggggtgggggagcaggtgtgggggatggaaggggtgggggagcaggtgtagggggtggaaggggtgggggggagcaggtttaggggatggaaggagtgagggaggaaggagagtggccccttcccaggtggttgggatagcctgagctgaacccagcagagatgaggaggggtccgtggtgggctgcagcgactagaattcagacttctgcttttgctggggacatctgtcttgcacagatcttcttccacccaagaccattgactccaggaagcaatgagtcgggcttgggggagagaaggcaagtctgcgctgtccccagaggaagcccccagtccatagggaggaagggaaagatgagcgtctcaggggaagactcccaactcggctacccatctgcgaaggcacttatgtcaccatggagaccagctggccatcgttcatccagtccgagcttgctttacctagacaagtattgagcctgtggtacctaagacagatgagtgccgggccttgggaacgggattcacacggcccccttctcccccacacccggcggcagggaggggcgtgcattctcgcagtctgcaccctgtggcctgggacccagcccgagggaaggggaccataggccagtgaggggccgattctgaagttaagtcacggcaccaggagcactgtggcgcaaacgtggagagcagttataatggcatcctaccagccagttacatgacagccattgcacgtttgctggagggaggtagagtaaagctgggacccagtgagggtggatggcctttccctacagccccgagggccccacgctgacccctctcctccaggaagccttccccagttgcctccagctggaaattgtatctctcgatgttcgtggcattttgtctgtcctgttctgaggccgtaatatgggattttgtgcgggttttgtccatctgggcgtggtgcctagtaggtgcacaagtgacccgtgccaaatgcacaaatgcttgtctgcctcctgttgatggacatctctgctttcttggctgcccctttgtcaagcactgacttttgattcgtctctgtgatgccttaacccccaccccagggtcgggcacgcagccaggccctcagtcactacctctagagtgacatgagtggggccaggtgcagtggttcatgcctgtaaacccagcactgtgggaggctgaggtcaggagtttgagaccagcctggccagcatggtgaaacctcgtctctgcgaaaaatacaaaaattagccgggcgtggtggtgggtgtgtgtagtcccatctactcaaggggctgaggcaggagagttgcttgagctggggaggcggaggctgcagtgagccaagattgcaccactgcactccagcctgggcaacagagcaagacactgcctcaaaaaaaaaaaaaaaaaaatgacatgagtgggaccaagcagtggggcctgaggagtgagcagagccttcctggaggagatggctttgtggctgtgtgaaggggctgtctgggtcctcctggagccctggaaggggcaggcgaaggaggggtggagaagggtgactgaggcctcagttaggggacacaggcatgttcctacctccgtccgtctctccacctccccctcaggcggtgctggtgaggctgttgtggctcagcccccacttagcagctcaggtttgaggaagttccgtgtgcaccgtccaggggtgcgtgtgacgtgtgagccaggaagaagtggagctggtctggccgcccctgcagggacagtgaagactgaggcccggttctagcccaggcaggacgccccaaggcccccctccaccagccaggtggaagatagtccagggccagatcctgccacactagggcatcacagtgagtgacaggggtgtgggctttggagttagccagacctccgtttgtgttccagcttgtcctggccttggacacgtagctcagcttgtcagagcccttcgtttcctcagaggtaaagcggggatgctggtactgacttcatacagttgggaggggtaagtgacttaatccatgatgcctggtccctgccagccttccacgaaggacagctctgactacggctgtctctgcagggaagccacctattcctcaaaaacaccaaggcctctgaggagaaatcccgacacctgcctggctggtgacgccggatgccgagggctcgtctctgggccccgacccacctgccttggggtcaaccaagaaatgtcctgacccagctctttttcctgaatccaaagcatcatccatgtttgagtaaggcacagtgcttgtgagcaccaagggctttggagggacctccccatcctcacttggcactgtgtaaccctggcaagaactggacctcctgaccccctgtcctcacctctctagaacagggcagtaacaccaacatgacaagaatgtgaggctcacatgcagtcgggcgtttgaaagacctggttcgcggttgccacggtgcaaatactggtttcctttctgtgccgtgctggggtctgcagaggtccgaggccccagacacccctgggttttgcatagttaaacatttgggattcagcctttctcttttctctgaataccgtactctaacttgcactgttaccttgagacgtaatttgtgtcctagtctctgcggttagaaagttcactaaataaattgaaggtcaagaacaagttcttctctctctcaaggcgcccagcacggacacgggtggttgcccgtggcgtcctctgcgcccagcacggacgcgggtggttgcccgtggcgtcctctgcgcccagcacggacgcgggtggttgcccgtggcgtcctctgcccctggcagcggaaaccttttttggtgaggtgcaaagggccatggttcaaagtgacccctcaagaggcatctctggctggacgtgtgacccgcgtcgtttcgggcttttgctcctgtccctgagcagatcagtgacccgattcccactgggattcccacactaggggtctcctttatccttacatttctcacctgaggaggcttctgagtgccggtccacaagggtctggccgggtcaccaagctggctctgaggaaggtgcctggggcagaagttgggggtggggaagtgcgaccccagggcagtcagagtcttttgcccggggaggagggcagctgtttgtggccaaaatgcagcccccgcctggcccccggcccctccgcttggcccctggagcagcccggtgggcaacacggggacccagcagggagggactggggtgtggggctggtgtaaactttattgcgagggagggcggcggggtcggggaggagcagcgcccttgccagggatgaaacccggggttggggcttggaggggcggccctgggcctgggaggcggcgctcagcctgggctgcagcctcgcggagggcggggaaggagggatgcggaggagggaggagggaggagggacgcggacggagggagggagggaggggagcgcggggagggagggagggagggaggcgagcgcggggaaagccggcgggactagggaactagcgggactggcagccgggactgagcgctccacaggcgccttctctccagcgccgcgtcccgtcccccccggcatgaccgacgtcctgccccagcccgactgcagcccgaaggcggggcgcgaacccctggcgctggaggagtcggggagcaagcgcccccccaacaccggcgcccggctctggggccgcgtgcgcaacaagctgctccgaaacaaggtgcccgcgggggctggaggttccggggggtgggggctcgggggcgctgcggggctcggggggctgcgggggctgcgggggctgatggggtcccgctcccgccccctccgtggagtcccgggacagagctggggtctgtgcgcgtccctctaagtggcttgaacttgatggcgaacgctggggccgcccccacccggaccctggcgctcgggcatctgcccctgcctcgggagaagggaggtttcttctcggcaggtggaccctgctttccactccgggagtgcaaacagcgcacggggagacgcctgcctctgggtctatgtcttgccgccctgttcagcctctacctgatccctgcatccagcgggccttgctggctgcccctttgctgaggggcgccgaccgcagcaccgtctgccgtgtgaggtttctctgtgcaggattgtggggaggggagatgctgccgggtctgggggctcgaggcttcccttcagggaccacccatctgactgtgggcccagtgcccgccgggcaccaggcgttccgtccatgtgccagggcagaccgccggtgcccctgcagccccagacctgagttgggattaaaatctgagatagaagccgactgtcctgcagctgggcaggctgcctcggggctggcttggggccctggcatcaggcacgtgaggaagagccagacccagcgcccagcgcacaggaagtgctcgataactctgcagatcaaatcaactgtccgagttagctgtctcagagtgccagtccggctggccagggctgggcccatccatcaagagagcaacaagggaggccttggccagtccgtggtggggatctgcagctcctcctgaggctcacaggacctctctgcaggctcttactgccagccggcattgaggctcctggcatcagccaggacgaagtgatcttgggctcactggcccctcgttttgtttcagctcctgccatggggcatacttgacctcccagaggtgacatcagccctggaaagtgctgggcagggcagcaacttgagctgtactgcactggcccctgtgtcaccttcagcctccctggggactgggctagcagagccctgctggccccagctgctgccagagcccctctgtgctgaggcagctgtctgtgcccggcagcgtggactcatcccctccccagcccctgctgaggccagcaggcaccagcccagagctcaccatccatccccaaacgtcagggttggcaagaaactgacctggcaggttccgggtccagcgccagccaaacagggcgcttccagtttacctgcccctttgaggaggtgcctggtgggcagggggcaacttttaaacctgaggtcccagactttcagttctttccctatgcatttgtggccggcagaactgagaagccccttcaagaattccttagctgggtttgcctctggcagtgcctggtggctccgtgtctgatggggatctctgggcaggggtggtggccaggcagacgccgggctattgagctgctgagcagttggcgtcagtgcagctcagggtggccccggccctgggctgctctgtgtgacgagcgattccatcccctaacgtgtgctgtgtgccacagtgtgtccgtgtcgtggacgcaggggtcagcgctgtggcggacggagggacgtctgccacagtgtgtccgtgtcgtggacgcaggggtcagcgctgtggtggacggagggacgtctgccacagtgtgtccgtgtcgtggacacgggtcagcgctgtggtggacggagggacgtctgccctgtgcttcccacctcactgtgcgcaggccagcgggtgagcagcagagtcaaagggccaggcctcttgctttctatcctcagccacattaacctggcattttcctgcaggagcttcacagttgggccgaggggctgggactaggcagtttcgtttcggtggggtaagggaagggtgcctggtactgcccagactggcaggagggattgcctcattaactcctcgttaactttgccctgagtgatgctgtgggtgcgagaaacaccggtggccctcctgcttccactgacctgaaggttcattaaaggctggaggcggggcgtgactcatccagggctgggattaaacaatctgttcagatggaaaggtctcatgatcagaactgagcctttaaatagtgcagggcctctggtttctgggggagaggaggcagggacactcacggaggatcctttgggtaccagcgggggtccctgtggttgggctgttcttgtcaccggaggagagttcaggggccaaagcctcattccagcccctgacttggcagtcagctttttgtgcgagtgtttagctgggagacacgtggcatctgggtttgtgggttcagccagggctctcggtattgaacttcgcgtttctacttttctttccttttccctgtttgtttttttttttttttgcctcaaatcacactcaagtagaccaggcccggtgccttcctctccctcccatccttccctcttctagattcttggttgagctttggatgggaaggggctgaattctagattctcgcttgagctttggaggggaaggggctgaaggaggaacccccccaccctgcccccgcagcatccccttgtgggagccgtgaggaggctaagagggcctgaagggaggccggtccagaagcatttgtctgtcggggaagttgaggcccttatagagcaaccaagtccaagacgctcctgacccagaccaggccagatgctggccggcggtggggactcaggctgagccggcagggtgtaaggagattgagtgcagcttcaggtgaccttgtctctgccctgaagcacagccatgtgggtctgagaatcccctacttccaaagagctcctcttaagctggacaccggcactgctgacccccacggtgagtcccgtgttctgtgatgggagctgctgcctttgcttcagagaggatcagaggtgttacctgaggaagggcggggtggagagcccctcttgggccattcggggaagcttcaggctcatgatggtcttagaagaaggtccctttcttggatcacctgatgtcaggagtccaagaccagcctggccaacatggagaagccccgtctcaactaacaatgcaaaaattagccaagtgtggtggctcacgcctgtcatcccagcactttgggaggcagaggcgggtggatcacctgaggtcaggcgttcgagaccagcctggccaacatggtgaaaccccgtgtctactaaaaatacaaaaaaaaaaaaaatagccgggcatggtggcgggcacctgtaatcccagctgctagggaggctgaggcaggagcatcgcttgaacctgggaggtggaggttgcagtgagccgagatcatgccactgcactccagcctgggcaacagagcgagactcggtcttggggtggggggaggaaagggtccctttctttgtcagcttgatcgccaccgcaggacaaccccacccctcacagagcctgtcgtttattccttcttgatggtaccaggtgtgcagaccacgtgcacaccccagaggttcactctaccactcacttggccatcgagggtacacaggtgctgggtacaagatacagatatgtcttgggctcgtctactttattttataatccagtctgggcgtcaggaaagatctcgcagccttctgcaatagaagtctggcctggcccggctgcccaccgcccttccttgtttcccggtgggaagaaagcttcatcgtgcgtcttctctgttcacacacacccccatagcgacccctcagccacagacaggggactacagtgctgcctcccccgagagctggaggcccctacaccagcccacctcttcctgggcctatgtgtgggtcctgactgcggccaggctggctgacaggttggcagtggggtcgggcgaccctccctcttttccacagcacttacccacctgccgagtgggcagacctcactgctggggcctcatgagtactctctgatctctctgccaggccagctcccaagaggcttgcttgagtccgcagagcgggaaccctggactctgagaatctgatgaaggttctggaggccactcagacacagagccaccccatgcacacactgtgtgcgacttcagagggggctgcagacatcaaggcgggaaccctgctctgagtgaacttggcaaggtgccgcttcttggtacctagggagggtagaagggcgctggtcctccccggcctccctgcaggccacagacggcttggccagccagcggtgctgggcgcggtgccccagcttttggatggctctggaccagggagaggagaacctgccaatcaagggggttcctcaaaggccaaagctgcctgagcccagtgttgctgtagtacccagaggcaatgaggccccagacattttggaaggagcccccaagcctgcaggtgtggctgggggagctgccccaggcattttggaaggagcccccaagcctgcaggtgtgagtctgggggagctgccccaggcattttggaaggagcccccaagcctgcaggtgtgagtctgggggagctgccccaggcattttggaagcgcccccaagcctgcaggtgtgagtctgggggagctgccaggtgttggccacagggcgctggtgctggagaggcctggccctctgctgagtggcctcgctcactgcccaggtggttgggaactggtcagcaggtgctgttctttgacctcgtttcccctgtgaactcatgctggggcaggaagatgtttgtgtcctgacggccccccagcaccttcgaggaacagacagtcccctgcgcctgtgacctgcctgccccaccctggggagaaacgcagcgtcagtcctgggtccagtgagccgtagacccttggccctccaggatgggccctggagaggcgggaggggcccgtggagctggtcctgggcttctgtagagaggccaggaggccccaggatccccacagagacttccccagtcccgcttcaagacagcggaaccagctcctgagccgaaatctggagggatctcctttctggaccgtgaccccagccggggctggtaccgatgaccggcacagccagagccgtgacatccacagcgcccttcccatccgatgcctggatgccgtggctgtgctcggggaggcctccggggtccccagcccctcaggctcatgtggcacaaggtgccagagaagacagggcgccaggccggtgggagtcaaggtttcccatttttctcgtctcagtctgctacttaactgctgtgtgcccgcgagtacatccctttgcctctctggttctctggtatcagctcaatgaaggagctgaacaggatgatctcctggaatccagttcatgtgatgatcttggccatgtctcaagattcctagtcctaaaccttaaaccctgagcaccctgggagagtctgtcacagggctgcacctgggccaatgccagccattcagtggacacgggagcagggggtttagtgggaacacagggcttcttgagccctgtcctgaagcagccccggcggggagccattgtcacctccttcccccatgccccagttggttcctctggcctgtgagtattgccggagcaccttccacgtgccaggcctgcaggaactagggacacagaggcgcccgagacagacgagaccctgtctgcaggaggagtccgtcaacaaatgagatccttgccggtcagatgagtgctgtgaaaaaaataaacacaactgggtaacgcagtagagagtgacggggggatgcctggcttgagaggatcacttttgaacgaagatttaaatgacaagaagaattcagccataaaaaacctgggggcagtgcattccaggccaaagaaccggcaaggtccacaccccgaggcaggtgtgctcagaggcagagggggacagtgtggggcgttacgtggggtcaggggacggcggccaggcgacgtggggccctgcggttcaggacagggcctttaatccgaatgcagtgggaagccgcggggtgttcaagcacagttctgtgacgatatgttttgaacacgtactgtacgaggcatcattcttagcctgtgacgcaactgaggtgacacttacaaggtgctgttattcacactgtttatttatttatttgtttgggttcttttgtttttgtttgctgttgttgttttgagacagagtcttgctgtgtcgcccaggctggagtgcaatggcgcgatctcggctcgctgcagcctccgcctcccgggttcaagcgattctcctgcctcagcctcctgagtagctgggattacaggtgcccgccaccacgcccggccaagttttgtatttttttttttttttttttgagacggagtctcgctgtcgcccaggctggagtgcagtggcgcaatcttggctcactgcaggctccgccccctggggttcacgccattctcctgcctcagcctcccgagtagctgggactacaggcgcccgccacctcgcccagctaattttttgtatttttagtagagacggggtttcaccgtgttagccaggctggtcttgaactcctgacctcaggtgatccacccgcctcagcttcccaaagtgctgagattacaggcgtgagtcactgcgccaggcctaaatgtgttttgaattttgttttacatttttaattttttttttttttttttttgtgggagtctcactctctcgcccaggctggagtgcagtggcaccatctcggctcactgcagcctccatctcccaggctcaagcaatcctcccacctcagcctcccaagtagctgggtctacaggcatgtaccaacatgcctggctaatttttgtattttttgtaaagacgaggtttcgttatgttgcgcaggctgatgttgaacttctggcttcagtggatccacctgcctccgcctcccacagtgctggattacaggcgggagcccccgtgcctggcccagactgtttttatatatgaggaatgaggctcagagagtgactcagatgaagtcacgtgagtggcttagccgaggggcgacgttcagaccccggccactcagcctcagcgcaggctctcacccgcggtgtcctgccttccgtggccggttggggttgggctgcgtgccccagatgggagcgtctggagacgccgggctcctgcccgtcaggcatcagtgtggtgcccgtcctggcacgctgtgcatagcaacaggcaagacggttcttctcgacgacgccactgaacgtgagactcggagcaaggcaaggcctgggaggggccgctcagagctgacctgggccctggaattgctggagcccctcacgtccccggcagcaagctccatgcccagaaagtgttctgggcccgggcagggagggtgaagctggtatcagagaaggctgttgatgctgctttttttttttttttttttttttttgagatggagtctcgctctgtcgcccaggctggagtacaatggcacaatctcggctcaccgcaacctccgcctcctgggttcaagcggttctcctgcctcagccccctgagtagctgggtttacaggcatgtgccaccacgccggggtaatttttgtatttttagtagagacagggtttctccatgttggccaggctggtctcgaactcctgacctcaggtgatcctcccacctaggcctcccacagtgctgggattacaggtgtgaaccaccgcgcccagccctgttaatgtttcttaaccactccaggtccagctcgaggcttcagagcccatggaggtctgacaggtccttggccttcccgtggcctccagcgtgaagcttcctggtcaggaccacagaaggcctctcatcttggactttgacctctgagggcgcccctttcctttcaggacagggcctccgtgttgctttggccctggcctgttccttttctcaagagggccccactgcccctgcccttgccactctggcatcctcgacctgccctgggctggggcagggccggcttcctggctggtatttgtagcccagttctgagctgaagctgaagcctccaggctgcctgcacagggaggcagtggtggggtgggctggccctgaggaagacggagccctaggccgctgggggagatgtgcctggctgtggggcctccaagagcagcccaggtttggattttgtctgcttctcctcaaggtcagccatgcccagcccgggggctaaaagcaaagtgggtgccagggcaggcagaggctctggagtggacgtggggccggcagaggcgctggagtggacgtggggccggcagaggcgctggagtggacgtggggccggcagaggcgctgtagtggacgtggggccggcagaggctctgcagtggacgtggggccggcagaggcgctggagcggacgtggggcaggcagaggctctgcagtggacgtggggccggcagaggctctggagcggacgtggggcaggcagaggtgctagaatggacgctggggaaggcaggttgctgcgggtgctaagaggctagcctgccttggacaaaagcgtcgttcagagctgctaatccccttcctcccatgaggcttggggaacttcgaagttctctggtgttggaggggaagccagccgaggccctgggacacggcatcagcccgagcctatctgtggctggcctgggtatggcaggtgggcacaccttggctgcaggacaccttggctacaagggagcctggctgaccctgcagggtgagggctggagaggcggagcctgcctggcctagcagtgtggatgccaagccatgggaagatgtgtggagagtttatggagcctggcccggtgtccccaacccagctgctgagctggaagccaggggtaggtcctggcagcccctccctctctgccctgcctctctcggagtcgctcggagcagtcacgttgacggaatcctccggcgcctcctcgagggaggagaggcagggtcttggcaactcccgtctcccccgttgccagcttgccagccccgccgtgcctctcacgcctgtggtctgccccaatgacaggccggcttcggtgtcccaaggggacccagccctgagcgtggggctgcccttgggggagggcaggggaaagccagcccgggctgccaccgtggccgctggcctgggagccccaggaaacgtgcccaccctcagacccgatgcctggctcagggcctgggctccgcggcccctccagggcaggcgtgaaatgtgcccacacagctccaccttccacgtggttccctgtccgggggccacttgcactgaggtccttctggagtcattttctgtttttttttttttttttttgagacagagtcttgctctgttgcccaggctggagtgcagtggtgctatcttggctcactgcaacccctgcctcccgggttcaagtgatttccggctaattttgtatttttagtagagatggggtttcgtcaggttggccaggctggtctcgaactcctgagctcgagtgatccgcccgcctctgcctcccagagtgctgggattacaggcatgagccaccgcgcccggctgggagtcattttctagcgttcctgtcccacctctcaggaacagatttaccacctttgttgtgaagaagcattttttttttttttctgccgccaggctggagtgcagtggcacaatctcaactccggctcactgcaacctccgcctcccgggttcaagcgattctcctgcctcagcctccccagtagctgggattacaggcacccgccaccacgcctggctaatttttgtatttttagtagagacggggtttcgccacgttggtcaggttggtctcgatctcctgaccttgtgatccgcccgcctcggcctcccaaagtgctgggatgacaggcgtgagccaccgcacctggctgaagaagcacttttttttatgaacctctgcaaccccctctgagggaaaccctcccgcattctgggatgccggggctcagagggtggagggtagaagagcgccagccgtgagaggcaggatggggcggcccccgagggcagggctgtgcctggaggcagggctcctcggggggtcagctcctgggcggtgggagtgaccgagtgggctcctgagggaagcggctttcaggaaggaggcggaggcctgggagctcttggggccctggcaaatgtggtcttcagattcccgtcgtccagtgagcccctggatcacgtcctgagtggcgtccactgaaggctgcttgggacctctgctcccccctccactgagacccccagtggccagttctaagtcccacctgccttgggcagggccaccacaggccccttactgtggattaaagggccctgggtgagggcttgtgggaggggaggtggtggaaaccatctccgaagaccttggggcgagctgcgtgctggagtggagagtgtggcccagcaggcaggagcactgggttggaatgggggctctgccacctccgagggagcaggagtggagaccggagggagcgtgcccctgaatccgagcacggggagctggccgggagcagccctccgggcagaggcaggagaaatggggtcacctgccccagggggtgagaggtgagccgagaggaagggctgagaccctcaggggcatccccaggatgttcctgaaactcagccctggaggacgctcaggtgtgcgtggagcaccctctgccctggagcctcaaatcctctccccgctgcggggccactttgctgattcctgccccaaacatgaggtcacttcggtccagaaaggcgaggcgacctccaccagccacctacgggattcttggcagagaatccacgctcaccttcgggtcttcactcctgctccctcggaggtgacggagccccatttcaacccggtgcccctgcctgctgggttttcgccgcaggggacctggtcgtctcctggacatgagcccccagcgccagcgtttctctttgggagaggcctgaatgcgcagtcatgatttgaccaggcgaagtgcccagacaaagagaaaacagtcggccggatgcaggggctcacgcctggaatcccagcactttgggaggccgaggcgggtggatcacctgaggtcaggagttggagaccagcctggccaacacggtgaaaccccgtctctactaaaaatacaaaaattagccgggcgtggtggctcgtgcctgtagccccagctactcgggaggctgaggcaggagaatcgctcgaacccgaaggtggaggttgcagtgagctgagatcgcgccactgcactccagcctgggcgacagagtgcgactccgtctcaaaaaaaaaaaagaaggaaatagttgagctgctctcagtgaccatgtacggcccagtcgtcgacccctggcccagtcgttcgtccgccttttggctccacgatgttttgcagcctgtttctgtctcctgcctgtggcccaccttggggaggccccagtgctcgtgtgcccctggtggtcttcccagcctgacccttcacgagctccctctgtctccctgcttcaggtgatcagacatcccccaagtacctgctcccctgggcccatggaaggcacctgtctgctgggaccagagggtgagcagtcaggtgtcccatccaccaacgtcccaggggccagcccctccaccccggtgctaatctcatcaggaaatagcacagtccacatttcccaggagttataaatagccagcgcagttgcgggcagcagcgtttctctggaaaatgtacgctgtgcctctccctccctcctctgtgtttaaatgatatcctgaaatagacttggtttctggaggctgatagcctcctgggaaacagagcgtcgttgtcagggcaccgtggggccaggcaggcctctctgagcggataccagggccacacctgcagcaggcaccagggccacacctgcagcagataccagggccacacctgcagcaggcaccaggaagatgtcagggcttgaggggcttacagcttaggaaagtgcccctggcccaggcctggcctcagaaggggctggagtgtgtgagacagcagcaagtgtcgcctgggaggctgcagagggtagatcttagtggagcaggaaggcagagaggacccaaagtttcccactgtgacctggggctctccgagaaggctctctggaggaggcggggcgagaactgggccttagcatcaggaggtgcagtcctgggtcagatgtgcccaggttgaacctggcagctggagcggaagtgatgggcacgaggcagcgggagggctgtactgggggtggcctcccagcaccaggtctgcccaccgggtcgggacacacaccaggaggcccgatgttgcctttctgaggaagcagcagttacagcagctgcgggtcatggacttcacacattctgcagtttcagcagagagggtgctgggggccttgattttgaaccccagctctgacttcctaggtgtgcactgggtaaattcctcactctcgttaagctgcagcatcctcatctgtgagatgggagcggctatgagagcttaaaccgcatatgtctgctatcatgatcatgaacgcagatgctgtgtgtagaggattcatcagtgtcagacttgcaggaagagctcgagataagtccgttgctctcactcttccataacagccctgtgagtcaggtgtggatgcctccatgaggaaattgaagttcacggaggtgaaaggccttgcccgagtgcgcacggttgaatgggagactcagatcagcctgcctccaaatcctgcacactccccccgaccaggttgtgtccaggtccccctgagacttgggaagggaccattggctcagcttcctgcagaagctgccaggaggcacccagtcgtgggaagctggggcggaggaggggctgtgggtgaatcggaccaggggccatggaattggcctgaggcttatgctgatgtgtggagagacctgcctcaagaaggggtggtctcaaaacatcgaactgcgccccataaatacatacaactgcaatgtgtcaattaaaaaataagggcccgggccaggcgtggtggctcacgcccgtaatcccagcactttgggaggccgaggtgggcgaatcacgaggtcaggagatcaagaccatcctggctaacacggtgaaaccccgtctctactaaaaatacaaaaaattagccgggggtggtggcgggcgcctgtagtcccagctactcaggaggctgaggcaggagaatggcgtgaacccgggaggcggagcttgcagtgagccaggatcgcgccacagcactccagcctgggcgacagagcaagactccgtctcaaaaataaataaataaataaaaaataagggcccacacagtggtacatgcctgtaatgccagctcttcaggaggctgaggcaggaggatcactgaagcccagggcaacatagcagcctggacggcacagtgagaccctgtctctagaaaaataaatacaggccgagtgcggtggctcacgcctgtcatcccagcactttgggaggccaaggtgggcggaccacctgaggtctggagttcaagaccagcctgggcaacatggtgaaaccccatctctactaaaaataaaaaaattggccaggcatggtggctcacacttgtaatcccagcactttgggaggccaaggtgggtgggtcatttgaggtcaggagttcgagaccagcctggccaacatggtgaaaccctgtctctactaaaaatacaaaaattagccgggtgtgatggtgcgcacctgtagtcccagctaattgggaggctgaggcagaagaatcggttgaacctgggagacgggttgcagtcagccgagatcacaccactgcactccagcctgggcaacaagagtgaaactctgtctcaaaaaaaaaaaaaaaaaaaaaagagggcatggccgctccagaatgtttcttccaagggtagcatctcagttgacaaagagcatttgattcctccaccctgtgtggctactgctgggggacagagctggggacagacccaggcccggctccgtgtccagacgagatgaaggaactacgagggacagcctgtgtgatccaggagggtttgcaaagaacagaagcagcttagaggggagagaggtttcgggaaagtaaggccagagctggggcttcctttgagaccctgtaggacccctgcctccagccgggctggtgatggcctcacgcttcccgtgtgtgaagaggtgcccggagcagtggttctccctgaggggcacttggttctctgcacacacccaacttctgtctcctgttctgggttccatcccttctctgggcagggcgaacccagtgcagacccagaccccgtcggaggcttgggtaccacctgcccccagccggtgtgtgggtgatagatgtgggaaggacctacatcgagctgcaggaagcccaaggctgacccagatccagtttcccttccgtgatgacagtggcctgttatagcaactgcgttcaaaccgtggcacgcacacctcagagtgcacagagacgttctgagggcgacgtgggcaggagagttttcaggaaatcagtttgcagattctcagctgccataggtgctattgccagaaagccatctgcctgagagccagcatctcgccatcctgtcctctgcagaggagaggcctgaggctggctgtcggggcttggcccggggtgcgcagacctcctgggtggggaacagaggggcttttagaaatgttggggtaggggccaggcatggtgggtcacacctgtaatcccagcactttgggaggccgaggcaggtggatcgcctgaggtcaggagctcgagaccagcctggccaacatggtgaaaccccatctccactacaaataaaaaattagctgggcgtggtggcaggcacctgtaatcccagctactcgggaggctgaggcaggagaatcacttgaacccgggaggtggagcttgcagtgagccgagactgcaccactgcactccagcctgggcgacagagcgagactccgtctcaaaaaaaaaaaaaaaaagaaacgttggggtcagtgttcagaaagtaaaagactctagtggccacttagaacctttcaaaagtcaggtggtatccagttctttgccttccacaaaactgatggaggactcaattttcaactgagagatcatttcaagtaattttcagtaataggtatatatgcgatttaaggcggatagcatggagagaggttaaagaatggtgtaacgcggctgtgataaaactcttttcgacctcatctacttctttatgtgaacaaaatgtttcattgttcacatatttcttgttcattttagagacatggtcctacattgcccaggctggtctcgaactcctgggctcaagtggtcctgtggctgggagccacagcacctgcacatctttacaacaaaaccagaaacatgaaccaaattgatgctgagcctcgtttcactctagcaaaaaataataccctatagatacgcgaactaaagcaaaaaatgttccgcccatctcattgagagagcattccaccaaaaagttactctgctacttaatatttattaaaatgtataatgaggccaggcgcggtggctcacgcctgtaatcccagcactttgggagaccgaggcgggtggatcacctgaggtcgggagttcgagatcagcctgaccaacatggagaaaccccatctctactaaaaatacaaaaaattagccgggtgtggttgtgtgtgtctgtaattccagctactcgggaggctgaggcaggagaatcgcttgaacccaggaggcggaggttgctgtgagccaagatcgcaccattgcactccggcctggacaataagagcgaaactctgtctcaaaaaaataaataaaatgtatataatgtgtcggcttactttttttttttttttcttgagacagggtctcactctgtcgccaggctggagtgcagtggtgtgatcttggctcaatgcaacctccacctcctgggttcaagcgattcttccatctcagcctcccaagtagtagcttggactacagtgcccgccaccacacccggctcacttttgtatttttagtagagacagggttttgtcatgttggccaggctggtctcgaattcctgacctcaggtgatccaccagcctcagcctcccaaagtgctgggattacaggcgtgagccaccgtgcctggctgtctttttaattatgtactgccaatcatggtactaactaatcctgaatatattttgaatatttggagccttgtggtctctggaaatttttgttttcaatgtatacagattttttttgtggaagcaaaatgtaatggtgaataaaggacttgaaaatataaaaatataaactaggacaacattctttaggagaaatggaatagaaacaaattcaaggagagaagatccaggagctctgtgagggaaagaagagcttgtttgtgtagttttttgttgttgttgttttttttgagacggagtctcactctgtcgcccaggctggagtgcagtggtgtgatctccgctcactgcaacctccacctactgggttcatgccattctcctgcctcagcctccccagcagctgggactacaggcgcccaccaccgcgcccggctaattttttgtatttttttttttttagtagagacggggtttcaccgtgttagccaggatggtctcgatctcctgacctcgtgatccgcctccctcggcctcccaaagtgctgggattacaggcatgagccaccgtgcctggcctgttttcttaatattgaattttgagagttttatataataagccctgaaattgggtaatattagccctatagctgtgttctttttcaacattgtttagatgttttttctttttttttgagacggagtctcgctctgtcgcccaggctggagtgcagtggcgcgatctcggctcactgcaagctctgcctcccgggttcacgctattctcctgcctcagcctcccaagtagctgggactacaggcgcccgccaccacgcccggctaattttttgtatttttagtagagacggggtttcaccgtgttagccaggatggtctcgatctcctgagctcgtgatctgcctgccttggcctctcaaagtgctgggattacaggcgtgagccgccacgcctggcctcgtgtagtttttaaatggatgagtgtgggtatcacgtcgctggggtatttagatcccactgaatccatgagaaggaatgatgtcacacttttattttaggatggcaatattgacatgattttggaaatcatactctttgcaactatttaaacttggaaatgttcagattttgacttcagaaagtgccagggagcgcacagttgctcagaattagttcgcaggtgcacaggcagacgggcgcgaaggcccccgagttacagaaacagaacgtggaacagtcctgtgtgagggttgcctctgacctcccctggggtccgcacctccctgggctccagcccgagcctggggacttcccctgtggaggatttgcttatttgggagccaatggcttgacccaagttttctccctgaatcttcccagcaatcccagggaggcaggttctgttgcagatggaataactgaggcttagtgagtttaaaacttgccaggattcaaacccaggcagcctcctgtgcgcgggctcctgactcttcaacacctccacgtggatgggctggttccctcctgatggacttgagcgcctcctaatcaggtgcttaccttttgtgagcctcagtttctgcatctgtgaaatggggtaataatacccatgtcccgggctggcagccaggagtgcctaacagggtgtgccctgcctcccccacggtgggtaacagagtgtgccctgcctcccccacggcgggtaacagggtgtgccctgcctcccccacggcgggtaacagggtgtgccctgcctcccccacggcggccacaggggcctgggggctagggtccccccaaagggttgatttccaggtaaacatcagcttatcccagctgctcacttccgccttcctgactgtgtagctggctctgagcagtgctgacccacggggagatctctggcttggcctccgagctggcacctctctcacccacattctctctctgcagctggacccacaaaccgtggagaccaagaactggcacacggacgtgattgagatgaacggggtgagccggggatgggaatgatcagtggcgtgagccgggaggtggaacgtctgtgcagcaggtgggcagcccggccctgtggctgctcctggggccgctgtgccgcctcgacctccccgcagcccagccccctctcccctcctgcccacaccctgcccgctgctgtcctgcaggtgttgtgttgagggagacctgggtgtgagctagccctcatttgcagtcttggggaggggacccctgtgttttgggggcattcctcgggcactcacaccctggggaatctttacctgcctcaccccccaaccagatcaaagtggaattttccatgaaattcaccagccgagatatgagcctgaagaggaccccgtccaaaaagcagaccggcgtcttcggtgtgaagatcagcgtggtgacgaagtaggtgctgcctcgggtctcccagtcctggcgtcggtgccccgggtcccccccagcccgggccccccagccctccccgccggtgcccatcctggcacctaatcagttaccccccgctcggcggtggcagatggccggtgtggatctagagtggccgcagaggcgctcacaggacacttcagaagcacgcgagccagcacctaaacgctggaaggtctcttgtgagatcccagatcgtctgctcctcgtaacaagcgggaagctctgtcagccgggggcctacgtttgggctcggcaccaacggggactggcggcccctcgggaaagggcacgtgtcccccggttcaccaccaccctggccccttgtctcaggcctgacccacctcctcatgtgggctgcctgctgggcctcctacaagcatctgaatctgggggacgttctttccctagagtctcggccttaccttcccaagttcccaaggcttctcctgcccacgtccgtcgatgccccttcggcaggcctcgggtgggctggctggggtggggtgcggtggcctctttctctgccctgcccctgcccccgccccagctctccatcccaaatgctagaagctctccagggtgtgtgtgtgctgggtgggggttgctacgggagagctgtcgtgggggctgccctccacccatcctcacgctccaccccaggcgggagcgctccaaggtgccctacatcgtccggcagtgtgtggaggaggtggagaagaggggtatcgaggaggttggcatctacaggatatcgggcgtggccacggacatccaggcgctcaaggccgtcttcgatgccagtgagtctgggaggcccagccggggcaggtgtggctgtgtctgagcaggctggtgggatggacaggagagctcgggggaaccaggagcctccctggagaggaggcttgctctgcttcagagtccccgtggcaagtgctttctcttgtaatcccctcccctccaatctcttgtcccttgctgcaggtaagcaactgcagaaactcacaagggccgactcacttgcccaggatgacccaacttgtaggttttggttctggacttaaaactcagatctgactccagtgtctttcttgctagttcctgggtgcctggtgagccgcagggaaagagctttgagcctgcacctgctgtctccagggccccaggtcccctctggggcagtgctgcctctgcgtgaagcccaccatggtgaggcctgacctttctggtttctcctccctgctcctgctggttcaggtgcagcagccacataccccactgtcaagaaacctgcactggccaggcagggatgaatccgtggggagcctggagtggaggacggggtggggcctgggaactggccggcgttggtgcctctgtgcagcctagaagctgaggctttgtcggaacatgcttttacgtgtgaaaagtgtgcaatgccttccagagaggggcttagcgatggagaggttccagtcggaaggaagctgcaggccacatggtatgaatgtggctctgaactctgggtgatggatttcactccccaaacaccctttcccaagcagccacagcagatggcccccaggctatctctccctgttcccccaaccccgacccacagagccgagtcacagacacctgtgggccctctctacatcctgctcttccaggggagaccagaaccagagctggagtgggtgggggctgtgtcaggatgggtcgggggtggaacggggctgctggcccagctaaggctgcctgacctcggccccacccctgcagataacaaggacatcctgctgatgctgagtgacatggacatcaacgccatcgccgggacgctcaagctgtacttccgggaactgcccgagccgctcctcacggaccgactctacccagccttcatggagggcatcggtgaggccctgagggctcctaggactgggctgggccagactgagccaggactccctgcccggagaagtaaccagcaggagaaatatctgtggcttcctttgctggctgaccttcccagtgcactggggcctgtggctgaggggtccgagggtgaggtgtggcctgctgggacctggtgcagacactgggccctttctcgcctgcctcttgcccctgatgtccccatgggcagccccttctgcttcctatttggacgttggcctcttgcttggaagctcgagcatccagggaagactgccctgaggtgagtggccagaagccagcatcccagaaccaaggaggaggctggcttaagccatagggcactcgagatgggttgtgctgagccttccagcgggaccacacaccgtcccgtcacctctgcggagggccccggccagcaggccttccgcctccacccacctgggccaaacccagccccaaggaatcccttcagccttctctgctcctggggcagactggagcttcagcccccacggaaggctgcttgcacccacgctccagcagcagaaggggtggagaaagagaatccaccgctggcaggatatgtccctactggcttaaccttagccacacagaccagggggtgtcctgttacgagacaggggatgccccagcacccaaggcctatgcagtcagctgcaggaagggggtctgctcccaccagccggcctcctggctgagttaccagtcgtggtggggcctcctggaggaagcagctgctgacagcccacccagacaccaggccctcccctgtggggtctgctccccaaaggcctggaagcctgggctctctcccgcaggggcccacagcctcacgaccacaggggccctggcggggagccccaggagccaaacgccacactggcccttctctcccacagccctgtcagaccctgctgccaaggaaaactgcatgatgcacctgctccgctccctgcccgaccccaacctcatcaccttcctcttcctgctggaacacttgaaaaggtaacggggagcggccccaaccccacctcctcagtccctcctcatgaaaaggtaacggggaggggccccaaccccacctcctcagtccctcctcgtgaaaaggtaacggggagtggccccaaccccacctcctcagtccctcctcgtgggcgctggcctccatcgggctgtctgtggggagtgagagtttgctttccaagttcttgcactcatgtttttctgttttgagaaatatttgggtcccgtaaccagtagtaacctcaaatattgaccatagaatgctcagaatggcagggtgagagcccaggactacaggcaggttttataatcagtgggtcccaacctactggtggttcattcaacgaatgtagccatttctagatgcagtggggggtggacagcagtggggggtggacagcagtggggggtggacagcagtggggaatggacagtagtggggatggacagcagtgggggaatggacagcagtggggatggacagcagtgggggacagacagcaggaggatacattgtaagccttgatgcaggtgctgcttttcagttacatagagacgtgtggactgtgttacagcatgggttgtattgtgggccacagtcaaaaaaggtgaaacccactggtcttggcccacacctcactagacatagggaaactgagtccccacaccaggcggagacttgcttgggttagtagcagacctgtccttagagccctcaacttccagatcctaaattcagacccttcttgccttcccaccaccctttctagtcaggtccaaccaagagtggctaaagttggttgtacttgtagcaaagttcagaggtcctcaggcttgcgtggggaggtggtccctgggcgtcccttaaacccacctgcacgccaggaccggggagccccctcagactgctctgcggaacaattcttccctgagctcagccccagctcagggccaggccccccgctgcagctcagccacgccaggctcgggagagccagtggagacctggacgcgcccggggctggtgtcttgtttttcccatcatgaaacatttttcctctggtttggccaggactagagccccaaccaattccgaaagcatttggcaagccttgtggggaggagtgggaagggaaaattcattcggcttccaccctgggaactgggcacagtctgttcccacatctgggcccctggctggaccgtgtgcgcgcgtgtggtgaggggctggccccgctgcacagctgcctgttggcatcacagtgtttgtttgcctgtttccaaagcaggcgcagccacagctcctgcctggagggtgggaatgatggtattgagggtgagaggcgctgcttagggtgggtgggtctcagcccagaaacattttttgagactgaaggagaaccagaggccctctgatatgtttgctgaccctgggcctgcctggacaccagccctgatggcagctcctgctgttaccccagggaagcatcgcagagcatctggcctgttgagtaagagaagcaggagaggatccagagggaggacaatcctgggtcccacgaggcagacggagaggcataggaggcagccctgggtcccatgaggcagacccttccggagaggcacaagaggaagccctgggtcccacgaggccgacctttccggacaggcacggggggacagtccccgggctcatctggaagtagggctgctcctgccccagcacagctggcagagccccgggtctagctagtgactcctgctgggctccaggccctgcctgcctttctcccctgccccacccaccttaactcttcttttgggccacttagcacatgagaaagcaacagagcggtaggtcctggaggcagctaccggggttcaaatcccagctctaccagttgctggctgtgtgaccttgggcaagtcacttaacccctctgtacttcggtttcttcatctacacgatgggggtgacgataatcatatttacctcaaaggactgcggcgagtgtgagttgttccagggagttttcagaacagtatctgctctcaggcaagggagctggagttggcatctgtgggctccctggctctggcagttcaccatcagttcagggggacccagcagctggagatgttagcacagaacactggcacatggctggggccctgctctcctggatgagtccccttcccccgggggaggtccccactcctaggagacagagacgaggtgaccccttccaggagtccttcaggagttcccacagcgaaggccaagggtcctggagctccgagtggctgctgaggaagggcttctttcctccccatcttctccttcttagggttgccgagaaggagcccatcaacaaaatgtcacttcacaacctggctaccgtgtttggacccacgttactgagaccctcagaagtggagagcaaagcacacctcacctcggctgcggacatctggtcccatgacgtcatggcgcaggtaccctggcaccgcccgggcccgtggctggcggagggtgacggtcccatgacgtcatggcgcaggtaccctggcaccgcccgggcccgtggctggcggagggtgacggtcccatgacgtcatggcgcaggtaccctggcaccgcccgggcccgtggctggcggagggtgacggtcccatgacgtcatggcgtaggtaccctggcaccgcccgggcccgtggctggcggagggtgacggtcccatgacgtcatggcgcaggtaccctggcaccgcccgggcccgtggctggcggagggtgacggtcccatgacgtcatggcgcaggtaccctggcaccgcccgggcccgtggctggcggagggtgacggtcccatgacgtcatggcgcaggtaccctggcaccgcccgggcccgtggctggcggagggtgagaccagccccttaggaggagagagaacagctcagagtccccacacctcttccctcgtgggaagctgggttgatgggctatggggtgtcaccagggaggcaggactgtagacacttctgcccctcccaggccaaaacaaacatgtgagcctagaccagggcccagagatgctggctgcattctcaggagggcctcagtctcagaaagcaagcccaggggtggggagatgctgggcccttgtcctcatgggtggaagctctgaggttgcttccaagggcgggaggcttccctgggattcctgcaagacccagagcaggggccggactgtggccgcctcaggacagagcagaagcttatggccaggttggggaagtggccctaggcccccgaccctctgccccgtagcaccttccacggctgcagaaaggcaaacacacctgggctccccaggaaggggcggtggccggagccagtctagggagtgggaggggcaacacaggctggagtcagcaaggacgaggcctaggacagggagcccagcctccgccttcctgtctccccacaggtccaggtcctcctctactacctgcagcacccccccatttccttcgcagaactcaagcggaacacactgtacttctccaccgacgtgtagcccgaggcagggtggctgcgggcgggtggtggaaccagcccctccagcctggggtccaactcagacttgaaagactgcaatagaaaactcccaaacccagcactccagactcgagggaagccagcttccaagaactggaatgcgtacgtcttttgtgccaccttgtacaaagccggctgcccagccccagcctcaccaccgcatcccacctcctgccctccatacctctagttgtgtctgatgctccgtgctgttcgggaattgttttatgtacacttgtcaggcagaaaaggtagtgaccggcccggcgtgggcacacagacagcccgctttgttctttcatttcctccagcactttctttccgcctgagtccagcccaaggccttttattttgcgctgtgtaactgctgccagcttctctcttggccctgctcccagatggcggtctcctggcagcctcccctcagtcttcctccacccgctcttccttcccagcctgcctgcatgcatgtgcacccttggtcttcgctccatcgccttgaaagctctgaagaggccctgggttgccgcggcagcagtggtctgtttgatgctgccgtttgccgctgccggcccctcctcagactccgcctttgggagcacacctgctttgccttgctgcctgtgcaaatgttggacaagcagacacactcacactcgtccccagcttagcacagagctggagcgcccatttctggaattttccgtttgggaatctccacttctggggtttacctgttcggcctcctgtctatcagtgaggcatctctgactgtttcttctactgcttttcagttcccttccctgctgttctatttcctttgagtgtaaagactcacaggtgacctgctatcgagatagccagagggtcaggagagaatgggggaggaggcggtcaggctgctgaggaaacaccacaggctgaacgggggaggaatgcacatgccacgctgggtgtcccgggtcgcggggaggcagctcagctcttaggagcaagttgtgggggcttttcaagaggggccaggcttcctggagggtgactgatgtggccgaagcaggtgtccaggcaggtaggctgcagccaggagctccctggcaccgcaggacctcgtggtactcttgccttagattttacacacactccacagccaagcactgccacggtcctccaggacctgggaagcaaaggcacaggcccacggtggccagccattgtggtgccgccccagcttctggatacagccttttgggtaaacactgggaactccagaagttgtggggagagtggggaatcagacagccgcctctaggggctgggttctgctggggcctccttgttggtgctgtaggcacccgccagggagcagggacccgacttgcagacgcattgcccggtactaggaaggagtgaggtgtgttcccaccgtacacttcccacacgagctgcggctgccagcctcgggccatcagcctaggagagcagatgcagctccaggggctcgacttatagccagttacagctccccggctcttctgtgtggcagagcgtcgtttccgggccctcagggctggggagctcagttcccattgcttgtgctcagggctgagtcttaaagaagggtttgccggccctaacgctgcagcgcgtgcgcggtgagaggccctttttgagcctgtttactcctgtggccttgggcagaacagtaaatactctgtgcacggaggaaagacatgcccaagaggaaggaagtactgaccatcggctgcctgtgagcagcttagcaaggagcccttgctccctgggaaaggcggtgaacttgagtctaaagatgcagtgcctggcccttcctaaggtccctgcctggcatccgagtgtcggtgtgtggcacagaaggctcctgcttgcttccaaagtgatggacaggaaggggcagagtgagtcacggcccagactgggcaccttcgcgtctcagcctcagggagccccacagccccaagctcgctgaggcaacgtgagaacaggctatgggaaggctgcaaaggctgagaaatgcaaaggctcatatttataaatcccacccccagagtggggagggtcaggtgccagacctggactaaactgcaccaaggaaacacccagcagggtctcctgtgagccggggaccatgcagcccgaaacctccagtcactgcgcccggcaggagtcaggagccagggactgtgcagcctggaacctccagtcactgtgcccagcagggtgggctgtgcccagcaggagtcaggctaagaaacgccaggtctgcctgttcttgctgggcaatggctgatggctgccagtttctgctgatacacaggtaggatgggacccttcatgaatatctgactttaataagttggtaaggatatatttttttgtctatgttctgtttcaacttatgtagattattataaattgatgtaaaccacgtgagaggaaaatgttaataaaaaatgcaaagccccatcatttgcac

SEQ ID NO: 15343 - DNA, 42704 bp, Homo sapiens
tctggaggtggggcttgagtttctgccaggaaagctgggagagccagggagaagccaagaggcgggagaaagtgcttcaagccgaggacctgccgttgttaaaggcctggaagtgagaacgtgccaggccctttgagaggttactgtcaacagtgagatgggtgagtcatcagctggggccccacggctcttgtttgggctggcttggtggcttcctgctgggcatagagtgagcagtgttttagaaagagtcatctgatgtcagcaggagggatgcaggatgaatgtcctgtcacacctgtcctgaaatcctccagcaccttcccttcgcctatggggccccccttccctttgcacagctgtcaaggccttgtgtgacctgacccctggaccccctgcctacctctgtggcctcaggaccaactccgtgctagaattgtgaactctcacgagagagagattttgtcggttttgtaacaaaacttgctcattgcagtctctggtgccgagaactgtgcctggcacacagtaggtgctcagtaaatattagctgaatgaatgcatgaaccagccagactaaactcatgtcattgtgcctcacatagtctctctcctgtctgttccccagccccaccagcatctctaaccactgctttttttttttgagacggagtctctctctgtcacccaggctggagtgcagtggcgcgatctcggctcactgcaacctccgcctcctgggttcaagcgattctcctgcctcagcctcctgagtagctgggactacaggcgtccaccaccacgcctagctaatttttgtatttttagtagagacggggtttcaccgtgttagccaggatggtctcaaactcctgacctcaggtgatctgcctgcctcagcctcccaaagtgctgggattacaggtgtgagccactgcgcccggccataatttttttttttttttttgagacagagtcttgctctgtcgcccagactagagtgcagtggtgtgatctcagctcactgcaaccactgcctcccggattcaaggaattcttgtgcctcatcctccagagtagctgggattacaggcctgtgccacccctcctggttaatttttgtatttttagtagagacagggttttaccacgtagaccaggctggtcacgaactcctgaactcaagtgatctacctgcctcggcctcccaaagtgcgggattaaaggcgtgagccactgcgcccagcctaattttttttttttttttgagacagggtctttctctgtggcccagtctggaacacagtagcacaaacacagttcattgcagcctcaatatcctgacccaagcaatcctcctgcctcagcctcccaagaagccgggaccacaagagcatgccaccacactcagctaattattttttaaaatttttatagagatgaggtcttgccatgttgcccagctggtctcaaactcctgggcttgagtgatcctcctgcctcggcctcccgaactgttgggatttcaggcgtaagccactgcacccggcctatatgtatagtttattcgtggacacaaataaggaaaaatgtataactaactcttagaggctccctctgtcagagggaaccagaggagactttctctttctttattatgtgtgtctacagagttagaattgttagtgatgtaacaggaaaataaagaagttaaaatagaagtgccacgattgggaacgtagagtgggctctgagggcaccagcgggcacatctgacgcagccaacggggagtcacgggaggctccctggaggaggtgacgtttaaagtcgaatctaaaaataagcagtgggccaggtgccgtgtctcacacctgtaatcccagccctttgggaggccgaggcgggtggatcacctgaggtcaggggttcgagaccagcctggccaacatgatgaaaccccatctctactaaaaatacaaaaattagccgggcctggtggcgggttcctgtaatcccagctacttgggaggctgaggcgaaagaatgggttgaaccgaggaggcggaggttgcagtgagctgagatcatgccactgcactccagcctgggtgacagagcgagactccgtctcaaaaaaaaaaaaaaaaaaaaaaaaaatcgcaataggtgtttccatgttatcccttccagaaaagtggcacctcagctgcagagttctgacactgctcccctccccagtacggccttgcccctcccttgacactgccttgggagtcagtcaccaggtcaatctgtccctgagactgtcagctccgcgagggtaggcacggggttccctgtccatggctgcattccgatgctagcacactgcctggtgcacagcaggcggctaacaaatgcttgctgattgggtcaggcggttaacaactgcttgctgattgggtcaggcgttaacaaatgcttgctgattgggtcaggtggttaacaaatgcttgctgattgggtcaggcgttaacaaatgcttgctgattgggtcaggcgttaacaaatgcttgctgattgggtcagggaaggagggaatggagggtgggtgtgggggaagactgtggggagtcaaccattggagactgagatttagacttgatggtgtcagaaatctcagtggctgcgaaagatttcaaacagtagctaggtgtggtgtgtgcttatgcccctcaccctccatgatgctgttcagcccacttctccaagttcatcttctgtcctctagcaagcagcgcttcttaacctgccttccttcctctcttccttccttccttcctccctccctccctccctcaagacagagtctggctctgttgcccaggctggagtgcagtggtgcgatcatagctcattgcagcctccaactcttgagctcaaacgatcctcccacctcagcctcctgagtacctgagatttcaggtgcgccactgcaaccgggttgctgaagctgcttaaccctttcctttcgggccttctcttctttgcctggaaacccttccctatttccagatgctactcagaagccactgtcctgtgaagctttcactctcaggcagcgttagtgccactgtcctccatccccagggtggctggtaaacgagaacactgcctcgtgtgttcacacgtcctcaccccagacggatcgagagcctgagaacggcaagggccccgtctcccagcctcgtatgtgtgccatgccaggccttttctgggtatgaatgaatgaatgaacagacagatggacagacaagatcaggagccaaagtggggaagtacgtgtggtcgtgtgggtgtaagaggctctaaagcttggtggggtggtggctttggcaaaggaaaagaagaaccgaaggacttggtaaaagggatgtgggggttgagggaaggaagactcgtaagatggcggccgcactaacagaagtggaaacccggaaggggaagctgtttcagaaggaggaagggtcctttggtccagatgtgtggagtggaagggccgtggctgggcttccaagtgaggagacccagtggccggggcaggtgctagacctagagcccagcaagacaccagggctgcagctggcagcgggccaccactggcctggaagggagaagggctgcttctctgggggaagggagcagagggctgaggctgggcccaagcaagtgactccacatttacaggaggcgggagaatgaagggccagcctacaccagagagtggtcggggcagtgcctgcatcaacagggcagctgagggcttggagaaactctagactgcagaggccaaagagtcggagagggaggcctctggctttggaataaaccgtttgggggggcctttgaagcaggctgcttctatggagaacattaggagccaggccgaggcagatggagtgtggagctcaggtccagggctggctcagggcatttgtcagggaaggggagggaagctgtggggactggtgagtcacttcccctccaggggggcaccgagggcctgtgagtggagtctgtgtctgatggaggggcactctcattactcactggaatttccagccaccggggacagggtggagtagagaggccctggatactcagggagtcacttgtgtggggttcagggattttgggaagaagtgggcgtcagtctcaccatgccgtgtagaggtgtggggaacggggacgaggatatcctggcagacttccaagggcacctcatgtcctcttgagtggaggaaggaacacagcaggggcctgtggggttttaggcccttcttcgtgtcacctgcaggtctgactcatgtgggcagcccatgccatgcacttggagcccgccgggcgggagacagaagaacccgtggtaccaggccctgagctggcatacttgtgccctggggaatgccaggcctggtcgttcccaagccctcgccacagcctcacccgcccgcaccaaatgaggaattgtggctgaaagggcccttcagatgcgccctggctatttataacccacccaggcagggacaggggaaaaccaggggctggaaggagatgggtggggtgggggtgtgcctctgttgaaccctggtggcacagttccctgatcaaaggctgttagccctggggcccctcaagggctcaccccgcaatcccctgctctgtatttcagctctgcaacaggatggagcctctctccagggagggcagcttctctgctgccaatggaattgcatgagccccacctagagcccagagcttctgaagaattctggggggagtggggggctgtggcctgaactcgggccacaggtgtggttcatttagacggcaccatgttgttttaaaatgttaattatttgccatcgttttaaaatcaggagcattcctgttaataagccagattttagcttattttgaacagagatcaggcagccatgagcttgcgtttcctccagcagccatcggctggagtgagtggtggtttcaccctgccctacctggctcgcttcaccggctggcctcacccgcaggcctcacccgcaccctcatgggtgccgtttgcaacctttgctccatcgttgggttgtaaaagagcttttcccagggcctcctctggactcctcctcccatggaaggaggtgtatgtgcatctgggaactagggccagggggaccagaatgtggcctcactccctgcacagttgggggttctgcaaccattggagaagccaggggaagctggctgggagtgggcagggccggagatggtgcctgtcctgggttctgtgtgcactccccttgcaggatggctccctgcggtggggtggctgggggggctgcttggaggaggtgggggtgctggtctcagcagtgcctgtgagtaggtgggaggctgctcagaggaggtgggggtcctggtctctgcagcgcctgtgagtaggggggctggtctgtgagtgggggggctgctcagaggaggtgggggtgctggtgtcagtagcgtccgtgagtggggggactgctcggaggaggggggctgcttggaggagggggatcctggtccctgtgagtgggacgcccaccgctcctgtgcaggacagtggtggcgccgcgctcctgcctgggggcaggtcaggcctgtctgttgcaaagcctgactcctccagcggcggcgggacgcggctgtggcttctgggcgggccggggcctcccctccggaagggggctccggcgcatggggactccggggtggctctgggggtcgcccctgctcgccgggctcctggctcggccgcgcgcggggaatgaagatgcgtctgggaagcggcctccccgctccaccccaccccggcccggccgcggcctcctcgctcctcctccgccgcagaagcctccgccagccgcggccccgcaaccccagaggacgggcggctccacctcgcgacgcgcgtttcctgtgtgttcggagcgagcgcgagcccgagccccggagcccgggaagggcgggccctgcggggccgggcgggacacggaggagggcgctgggctgctgtgcggcgggttcgcctccgccacgggccgggcacggcgtcaggggctgcccgggccttgctccccctttcgccgggcgaggacgcgcgaggcggcggcggcggcggcggagcgggctggactaggtccgggatgcagtcccgggtcgggagccccaggccgggcgcgcgggtgtagacctgccccccctcccgcccgcctcctccctcctccctcctcccgccgccgctgcgtggaccccgcttcctgtctgccctccgcgggctccggctgccatggaggaggaagaggaggcgataggcttgctggacaaggttctggaggacgaagatgtgtttctcctggaggagtgcgagctgggaaccccgaccagccccggctcagggtcccccttcctggtggctgtgaaggtgggagcgtgacacgccctgggcgctggggggggccgggccggcgctgccgaaggtgcgcgggagaaatggctgatgcgggcgcagagcgcgcggccgggtggaagccctcggcggagggtcccggccccggcagctgttcccgggggagaggggcgggcctgcctccccgaccggtgtcctcggggcagtggtggccgccccctccaggccagcccagctcagggctccggcggctgtgccaggagtcacctggcgcgcctgtcagcccgagcctcgccgcctccctggagcgggtgggcaggaatcccccgtttccacggcaaccgcaagagaggggccaccctcttcccagccaggagacagggacttggtgtctccgagctgaggcaagagggtgtttgcaaagggcaagagccagaggtcactgagcttccttgaaggaaaagcactgggtcagctgaaggggggagggaacagctggcttggaggctgcagccaggtgggcaggtgcccttcccgaggcgggacaggcagggagcatctgctgggccctggcccacccgctctggggctgacggcgttctctgcagcagtgacccgtcctgtaggagaggttggctcccggtggaactggagggcagtggtggccagaatcccttgaggagcggggcggccccggaaccacgccggctctgtgagtctggcccggcacaccacagcggtcttcctttttctctcctggacacacctctcagagcttccacctcagccttttgctcagctgctctctggttctgtgtcgagaagggaggcccagtgaggatgcgtttcggggagtttgcagactgctaggcgaggctgcctaaccgagtgcccatcggcggggcctagaaggcatgtgcagccagcattgctggggacgggaggctgtccctgaacctctctgggcctccctgcccctcacagaagatggggatcacagtcctgccccacccactctacagtgtggctctgaggaggagccaatggaggtaaaaatagatgcagaaccacgggagatggctgatgtgtgagtatgggtggagcggtggctgcaggcctgggtggggagtggagctgtagggaggctggcagtggctggcaccccaccctgtcttctctgatctggtgctggcgtagggccgtgggggtaagtcacgtctccccgtgggctcagggaggcctctgcacttagggtctgaccagcctccccactaggaacagggtgggaaagtctgctcctgagccaggagtcaggctgggagtagcaatgctgggatgggaggtgtgtggccctcatgggcctcctctgggaagcccccagcacagatgtgggcccactcagaggctgcctcctggacctccccttctgctggaccccggcgtatgcctcagctaagcccgtatttcattctgctcagatgctcagaactctagacatttgcctccgcaattatatcccattctcctggaggaccaggaccatgtcatattcattgctgaacactgcacagtgcttggtgtggggctggtgcctgtgagagtctgcacaatgtgtgaggcccgctggggcccacgaagggtgcaccaggttcccagcctcgctccatctcagaggtgtcctgctgtgtacggcggtggcccacggatgccaagagagcctgagcacgtgtcacacctgaaaacgctgctcctcctgggtccccgtgagcaccgggatggtgtcttcccctctactttgctgccagcatgggggaaggagacctttctcgaatgccggggagttccaggctccctgctccatcctgaacacctctagaattcctccctcctctaccggcattggcctcagagggagaagacaagcaggtggccacagagcggtgggaagaaagctcctggattcattcaacaaacactctcaggttaggtgctcttcagagcaccctgcctggcactgtagagatgacaagaggaacaaggcgtgatcttccctcacaaggcgttcagagcaaggggcaggtacagggagtaggaatagagtacggaagtaggcagggtgggccagatgcggtggcacacgcctgtattcccagcactttgggaggctgaggtgggcggatcacctgaggtcaggagttcgagatcagcctgaccaatatagtgaaaccacatctctactaaaaatacaaaaattagccgggcgtagtggtgggcgtctgtaatcccagctactcaggaggctgaggcaggagaatcgcttgaacctgggaggcagaggttgcagcgagccaagatcatgccactgcattccagcctgggcgacagggtgagactcagtctcaaaaaaaaaaaaaaaaaaaagactgtgagaagagtactgataaaagggcaccaaattcaggggagaagggaccacttctagtggagttggggatggcctggatgcgtgcatgtgtgtgtgtgtgcaggccaagggtcatttctggatgatacactcctgtcctgggctgcagaggttcttggcacacccttccctggcagctagtaggaatccaaggcaattctctttgctattactttactttaggggtacttaccttaagcagcagttgcgttgtgagcatgtgcccaagtgccaggcccataaatcaatcctgtttccagtgtcatttccaagacgcttcatcttcctggggggcagaggtaaagttggctgcagttttctccaaagctatagctggagtttgctgcatatctcagcccagacttacctttgaagagttattgatctgtaaaactggtaatgcaaataaaatactgatagcagcgtcatgttgcatttgtaaaatggcttacacttgccaaaaatgtttcatgccattctatttaaagataggtagggttgtgacgggggcgttgtagaaggtgctattttaaggaacttatttgtcaggaataaaaacccttttgtaatgcagattaaccctttaggtatcattctgtgccatttttttttttcttttgagacagagtctcactctgtcacccaggctggagtgcgatggcacaatcatggctctctgtggcctccacctcccagactcaatcagtcctcccacctcagcctccccctcactacaggcacatgccaccacgttgggctaatttttatatttttgtagagacagggtttcaccatgttgcccatgctagtctgtaactcctgggctcaagcaatctgcccctcttggcctcccaaagtgctgggattacaggagtgagccactgagcccagcccaattctgtgccagtttttaatggatcatctgaaacatctctatttctgtttcacctgcccaggtctcttgtgcctgcacatcatgcctgtatcccccatttggatgtttttctaagtgcgggccccacgtggtgatttgagaaatgatcggtggcacctcgatctatattttgcattttaatggttaagtatatattttaatatatattagaaaaaatatgacctgtacatttttcttacgatttcaaatacgtgtagggtaagactgctttttacaagtcagttcttgggcgcagtggctcatgcctgtaatcccagcactttgggagactgggcgcggtggatcatgaggtcaggagttcaagaccagcctggccaacatggtgaaaccctgtctctactaaaaacacaaaaagtatctgggcgtggtggcgtgcacctgtaatcccaactactcaggaggctgaagcaggagaatcacttgaacccgggagatggaggttgcagtgagccaagatcctgccactgcactccagcctgggtgacacagtgagactctgtctcaaaaaaaaaaaaaaaaaaaaaaagttactgtaaagaacaatattgagtaaagaatagtgcaggtggtggtatgtgagtatggcaaaattttaagggtgggatatgaacaaccaaagtttcaaaacattgcctgtgccctatggtgcctgcctaagacctcagacagcaatagggagcccagaatacggggatccacccttcaggagagaggggccactggaatttggtctttgtcccccagcagttgacccgtcttctctgttctaaattctgccaaggaagcagctgaaagagacttcctcagcgcctagcgctgggagaggagagggtctctcgatgcctctacactgcctcagctgtcctgagactgagatgggccagttgtcctgaggttgatgcttggtgtgggtataagccccaggcacggccacccccacccccaggcccagtggcatctactctgagcagatcctgctgggtactcctggcagccagctgtggcccgtgaactgacttctaccgtctgtgaagcctcagaccctcgctgcatgccctatagccttgagtcgcagccagagagccagccctgcttgttgtcttggaggccagtgctactggagagattgtgtctttgcttggcctggaaccagatgtttggaggctttatttagcctctcaactctgtggaggaccaggcctgagctggccacgccttatctctagacattgttcctaccagagtgacctgacgtctttggtttggcggcttcaagctgccacactgtcagcctagcagattgtgcaggatgctgaggataaacgaacccaccaggactgcatttcacaagttctggctgggaggaagtgaggacaggcagcttcccggtgctggagacaggtaggcagcgtggcagaggctgtgggacctggaactctttagagaactcgctccggagcattctaggcacgtgggcacctctccttcaccttcgtattcccagtgcctggctcccggtgggaatgggtgagtgagtggtgagcctggtttttgatgagacaagagacgccctgcaaagactgaagaaacaatgtgaatttcctcatggctctaaactgggaattgtggagtctgaggaaagctggaaaagatgggagatggaacaggccttcctttggtggtgactgagcaacgggtctcctgttagccaagtgcaccgaggctaatttcccatccgtacgctctccaacgcctttgctccaatctcagccaaaactgcagcgtgaacggggcccagagcaggactcttggggctgactgttgcctcttgagggagggtcttcctgagttgtcttcccatcagaaccagcctttcaagagtggactatgaatggaagtcttgaggggaggatcttgcagaaatgggcgattacagggcttccagggtctatgctcgtgccaggggggatgaagcttgtttgtggctggggctgcaaatccctttcttccccccatcctagtccaaccagctctacagttacagctcacggtgtggcatttgctaaaccctcaggcaaaaccttggttggcagggaacaggagggagtgctagcccccagcacaggggatgagttcccatttgtcaaggctgggaagcagcaggaagacccctgagggtctgacctggaggggctggagctgggggctgttccaggctctgatcttgtcccccggggctacgtgtgctggaggctgtgcaggcctctggcagtcccgactctcggtgcctcaggaagatgataacacctgccaggttttgagactccggtgaattgaaccacaaagatagctaagctcagttcctggaatttgtgaagccgccaataagtaactattgcccttgcctgaagcgtggggtctgtcttgcttttctaatgctgctgaaacaaatcgccacaaacttaagggcttaaaaccacacaaatttattctcttatacagaaatctaaaaaggatctcggcccggctccatggctcacacctgtaatcccagcactttgggaggccgaggcgggcgcatcacctgaggtcaggagtttgagacgagcctggccaacatggtgaaaccccatctctactaaaaatacaaaaattagtgggtgtgatggtggacgcctgtaatcccaggtactcgggaggctgaggcaggagaatcgcttgaacctgggaggcagaggttgcagtgagctgagatcatgccattgcactccagccctgggcgacagagggagactttgtctcaataagtaaatacataaataaatagattaattaaaataaaaaggatctccagggctgcattgcttctggaagctctagggcaagcttttccagcctgcggccatacggcccaggactgctttgaatgtggcccgacacaaatttgtaaactcttaaaacattatatatttttcttttagttcatctgctgtcgttagtgttattgtattttatgtgtggcccaagacagtcgtcttcttccagtgtggctcaggggagccaaaagatcggaagcccctgctctaggggagtgagttcattttattgccatttccagcttccaaaggctctctgcattccttagctcgtggccccatcctctgtcttcaaacctaccagtgtagcatcttccaagcagtccctcaccactaccctgtctccccggccctctcactccccttctgtggccacgatgcctcagggaaagatggcattttaggcagcaggtaaagaacgaaccgaaagctagagacctttgaagatgaggaggctggttctcctgcgtgtgggggagactgagcgatgtcctggctgtgggaaagactggaagggtagggacgggcatccgggccactgcaggtggctcataaaggatatggtgggccccatgtcccagtctagggccgaatctttacttgttttttaaatgtctttccggcagggtgcggtggctcacacctgtaatcccagcactttgggaggccaaggcgggcggatcacgaggtcaggagatcgagaccatcctggctaacacggtgaaatcccggctctactaaaaatacaaaaagttagctgggcgtggtggcgggagcctgtagtcccagctactcgggaggctgaggcaggagaatggcgtgaacccgggaggcggagcttgcagtgagccgagatcgcgccactgcactctagcctgggcgacagagcgagactccgtctctaaaaaaaaaaaaaaaagaaaaaataaatgtctttcccactagagtctaagccacttgagaacaggggccactgtctgtttcccatggtatctatagggcctggtggacattcagtaaatatttattgaatgaataaataaatggacacatagcccagtggaatccccaagtactcgcgttttgcggtattcatactcggtccttggcaagcatcgggcaaggtggcactcttaggagttgaatccagctctggtgtgtgggacaggcaggaggagaggaagagagggaggaaaagtcggttcgagaacccaggtggaaaatagattgagggaagcaaaacgagatgttacaggaggaatatgggtgattgtcttttccttttatatttctgcatgttttgtatattttttataataatatctgacttttatcccctatgaaagtgtcgcttaaaataaaaggaaaggggaaaggggggccgggcgcggtggctcacgcctgtaatcccagcactttgggaggctgaggcggacggatcacctgaggtcaggagttctataccagcctggccaacatggtgaaaccccatctctactaaaaatacaaaaaaaattagtctggcataatggctgggcatggtggctcacacctgtaatcccagcactttgggaggctgaggtgggtggatcacctgaggtcaggagttctatatcagcctggccaacatggtgaaaccccatctctactaaaaatacaaaaattatctgggcatggtggcaggtgcctgtaatcccagctactcgggaggctgaggcaggggaatcactggaacccgggaggcggaggttgcagtgagccgagattgtgccactttacttcagcctaggtgacagagcgagacttcgtctcaaaaaaaaaataaaggtcgggggggaagggcagggaagcagaccgtccacgcagggttttggcctccttgctcatgagctgttggctgtgctttgcgtttgtgcaggtggaagcagggaaaggcctggagatgaggaagctggttctctcggggttcttggccagcgaagagatctacattaaccagctggaagccctgttgctggtgagtacagtccctgctctggggccttccggtccccccgcccgtgttgggtgatgtcatgctctgaagctgcttttggagttggagaggaaaggggaccgtacccgtccctccctgtggacagagtctgcagctggtctgcttctggctgggcatcgggcagcccgggtcattgccagaaagggcctgtgcctctcagctccagctctcaaaaggcaggagaagcacacccggcttagagatggcaaacacacctgtcacccacgaccctggcatagggcatcgtgaacccatcatggtgctctgcctgcctgggcgggggccgagcgccttctccacgctgtgctctgggcagtcattcccaatcaatccagttaagaagtctctgccgtcttgtgtccaagtccttctacctccctgggtgagggaaccgttagtgccatcctgaggccccgtgtcaggaaatatgaggtgggaggctgtgttctttttttttttttttttttttttaagacggagctttgctcttgtcacccaggctggagtgcagtggtgcgatctcggctcactgcaacctctgcctcccgggttcaagtgattctcctgcctcagcctcccgagtggctggaattgcacgtgcacgccaccagtcctggctaatttttgtatttagtagagacaggattttatcatgttggccaggctggtttccaactcctgacctcaggtgatctgcccgccttggcctcccaaagtgctgggattacaggcatgagccactgcgcccggcctgtctgtgttcttttgagaagcggcacagctctgaggcatcaggccaagctcagccctcggtaacatgcctcagttcccctcccagatggaggcatcgttgtgagagtctgattgggaggggaatatgaaaatgttttcggaagataaaagtactacacagatgtgaggtggttttgccttggaagaaagtgctccttagatgtgtctggatgttatgcagagtgatcgtggcgtgtcaatctttcttttgggtattttgcagcctgagacataaggtaattgtcagaaaagggagacgcagaagtgtggatctgtggaagctcattcttaacaagaattctaagatgcacatttaagtacttgccatgacgtgaggtgttgtcacacgtcaaccctgagatgctgtcagtgtcccaggggacttgacatttatgttacccaggaatgactgtgtaaatgtgcaggtgcaggccgggcgccgtggctcagtgcctgtaatcccagcactttgggagccccaggtgggcagatcacttgaggacaggagttcgagaccagcctggccaatgtggtgaaaccttgtctctgctagaaatgcaaaaaaaagccaggcgtggtggtgcatacctgtaatcccagttactcaggaggctgaggcatgagaattgcttgaatctgggggcgaaggtcgtagtgagctgagagtgcgccactgtactccagactggacgacggaagtgaaattcctcaaaaaaaaaggctgggtgcagtggctgacacctgtaatcccagcactttgggaggccgaggtgggtggatcacctgaggtcaggagttcgagaccagcctggccaacatggtgaagccccatctctactaaaaatacaaaaaattagctgggcgtggtggcgggcccctgtaatcccagctactcaggaggctgaggcaggagaatcgcttgaacccgggaggtggaggttgcagtgagccgagtttgcaccattgcactccagccggggcaacaagagtgaaactctgaatgtgcagctgttttgccacacgccaggctgagtacgtcccatctctccaggagtttatctgtgtgtacggagctgttttccaagtgaggggcagtgtggcaggtagctgagggtcctggtctggggccagagctagggcaagacttggccctgccattaagagcaggcgtattgcactgtttctcaaactgtgcctctcagcccatcagtgctttgggttgtgaaatcagtacagtgggttgtgaaaccagtacagtgggttgaaccagcatttttaaaccaatgaaaaaatgtcagcatgcatcatacacgggaaagataagtgagggaactttcggtttgttgtctgtctgtgtgcctgtatatatatgtaattgccgggcccatggtgtcttacacctgttgtgggtttgaaaactgctggctttggccgggcgccgtgtctcaagcctgtaatcccagcactttgggaggctgaggtgggcggatcacaaggtcaggagatccagaccatccttggccaacacggtgaaaccccgtctctactaaaaaagtacaaaaaaaattagccgggcgtggtggcgagcacctgtagtcccagccactcgggaggctgaggcaggagaatggcgtcaacctgggaggcggagcttgcagtgagcagagattgcgccactgcactccagcctgggcgacacagtgagactccatcacaaaaaaaaaaaaaaagaaaagaaaactgctggctttgggcaagccctacataaattccttgagcctccatttctggatctgaagatgagagggatgccattctttctctctctttccatggggttgagaagatcgggagatgctttcgggacctcatacagcgttgagttacttaagacactcaactgttagtggaagaaaggaggacaggcaaagagacaacccgtcagacattcgtgaaacacgtcttccaaaccgtgaattgctgtccaaaaaggaacatagttgtcattactaacagggtgtgtatttgaaaggagttcagacagaggatctagactgcctggccgtactggctccaggctttcagcaggtgaatgagctatcgtgcctcagtttttccatctgcaaactgggtatacaaatagtatgcttttcatggggtcgttgtgaggattaaaggaatttatacacagagttctttttttttttttttttttgagacggagtcttgctctgttgcccaggctggagtgcagtggcacaatctcggctcattataacctccgcctcctgggttcaagccattctcctgtgtcagcttcccaagtagctgagattacaggcacccaccaccacgcccagctaatttttgtatttttagtagagatgagatttcaccatgttggccaggctggtcttgaactcctgacctcaagtgatccgcccgcctcggcctcccaaagtgctgggattacagatgtgagccactgtgtccggcacataaagctcttagaacacagcctgagtgttcgttgacactgttaatttctctattgctgggagaggagacaggttagggcttcgtggtttctgccacaacacacccgttccctgaaggagggagtggcgcctgtccccatcagacacggagcccttagatcccacctgccacccacgagcctcttcctctgggccaagaccaagagcccctccctgctctgcctttctaacagctcatgccccaaaggcagaatctgtggggcaggggcccccttcctgatatgcctggcgcaggttccccccttccccagctgtctcctcccggggcaggttccccccttccccggctctctcctccccgggcaggttccccccttccccagctctctcccggggcaggtttccccccttccccagctgtctcctcctggggcaggttcccccattccccagctctctcctggggcaggtttccccccttccccagctctctcctcccggggcaggttcccccacttcccccagctctctccacccggggcaggttccccccttccccagctctctcctcccggggcaggttcccccccttccccagctctctcctcccggggcgggttccccaccttcccccagctctctcctcctgggcccctgcttggctctttcttgagcagagaccagagggagcaaaggaagaactcgctgggaggccaggtctgtggtaggagggctcaggaagaggagtaggaccctccacagccacagcctcagaagaaaacctcagagtgaaagaatcacacccttcctcctctcctccctgagctgggaacccctgcaccctccccacccctcagctaggaggaagctaaaccttctgctcttcggggtggcctcgcaaaggtgccagcttgaaggagaagaaattcgttccctccatgctcgctttcccactcctgaccccattcccaccgctctgccccagcctgtttgctttcatctgaacacttcctgatatgcaaagggctgggtgtgtgtacctaaaaccatgtgcacacacggggcagacgagcctccacacagaagcctccgtcctggcctctggggtgcttgtgggggtcatcttctggggccctcctgcttcctggtgggctctgattacaggaaaagcctgggagcctgggccgaagtagggggtgaaggaaaaaagatgaagccaactgcattgaaattctggatctccttgacactgggaactgagcttgggaactgtgtcttgctacgctggggccacagggtgaggccactccccagagcccctcccaccgctggccacgactggccctcctggggtggactcctggccacgctgcatcgcaggctctttatctataaaacaggtgaatgaggccttcctccctgggctccagtgacgagtgactcgggtggcatggcagcaagcatgccaggccttctggggcaggaggtggaggaagtgggtacatttctttcccttatttcgaaaggccggtcgctgggggacagagctgacaaacggctatgtgaagtcccactggcaagtgagaaccggcccaggcccgtcttcctgagaagcagctggtatgggagccagggttgaagtcactcacgggtcctctccgagaactcgagtggtgaaatggagagccggggcctgcccttgtccctgcagcaggactggggaggagggggtgcctgagtggtgtgctagcgctttggcagaatggctgtgccgtgccgaagctcagtgtgggtcaccttgcctttcagtccaccctcctgcccctgagcccatacgcaggacttcaccagagacaaataacggcctcgagggtcctggccagccaagggcacacacccagccctgtcccctccccgcgagtgaaatcaggagtaacagccaaggtccccatcgtgtcatgagaaccatctgatgccccaagcgcaggccccgtccttgtgactggctgtgggtgagcgtccatttcttccccttttgcagacggggtgggaagttgaggaggaagcataaccattgtgttttgtcttcgtgtgggtggcagatgagcgcgtcgcggcttctgagaaatcccgtctccttggccttcctgggactgctgaccttcctgcttcccttatttccccctcagtggggactgcgccaaggcggggacaagaattcttgggtatggggattctgtggcgactctgcgggctcctccgtggggtcctgcgttgaggtgaaaaggataaactcttacgacgatgtcaatcctgaagctagttccatgtccctcatggagggtggggagtccccaaagctttcagctcacccacctgggcttggggggacactcttcccttgctcctgcctcccggtgccttctgtttccctgtctggcatgcctctctacgcccccactcctccacctgctcagctctccaaggacctggtatgtgtgcctcctccatgcagccctccaggctactccagcacaaccttggaaccatgtggttggtgcttacagtcagtcgcatcgtccatagtcatttcatctgtgttggcccattttgcccaactggattataaaggtctcagccaggcatggtggctcaacacctgtcatcccagcacttcaagaggccgaggcacgtggatcacttgaagtcaggagtttgagaccagcctgaccaatatggtgaaaccccatatctacaaaaactacaaaaactagctgggcggggtggtggacacctgtaattccagctactcaggaggctgaggcaggagaatcgcttgaacctgggaggcggaggttgcagtgagccgagattgcactattgcactccagcctgggtgacagagtgagactctgtctcaaaaaaaaaaaaaaaaaattgcagtctgggaccatgatcgtgtacgcactgacgggaatgccagtaggtagcgcatggctgtattatcccagtttcacacatgaggctgctggtgacacgaagcccagggatgctgagtgatgtgcgcacagcagagctgcgactcaagcccaccctgcctggcctgcaccaggtggaaccccatgcgcttgcctagcaaggaccagacaccgaggggccgttggttctaggacggcgagggtcagaaggagaggcctgaccggacgcagaggggccgttggttctaggacggtgagggtcagaaggaggggcctgaccggacaccgaggggccattgattctagcacagcgagggtcagaaggagagtcctgactggacactgaggggccgttgtttctagcgcggcgagggtcagaaggagggtcctgctttgtcctgcatggattgttggatctgggctttttagagctcggaggatgaaggagccagaaggcagagcaccatctgggtgtctgagtagatgagacgacttcttccagtgaacatgggttctgtctccatcagagtgaggcgatatatctgagtagatgagacttcatcagaatgaggtgatgtgaggctggagtgaggctgggctgggagtttgccgtggttggctggagctggtggtcgtcgttcagagggagctggcgctggctttggtgttcccttcagtgcagcattttcagcagtggagtcacccattctctgctagaatgcttctcttgtcggaaagctcactacttaatcctatgggggacagctctagtgagcccgaatctgaccccataacttttccccactgttcctgggtctgcagagcaacgtagattaagtctaagcctcgtttttgtttttggagacagagtctggctctgtcacccaggctggagtgcagtggcgcaatcttggctcactgcaacctctgcctcctgagttcaagagattctcctgcctcagcctcctgagtagctgggattacaggtgtgcaccaccacgcccagctaatttttgtagttttagtagagacggggtttcaccatgttggtcagacttgtctcgaactcctggcctcaggtgatctacctgcctcggcctcccaaagtgctaggatgacaggtgtgagccaccgtgaccagccaagtctaagcctctttccacgtggccttcaggtaggtgaagaacatcaacagaatccgacatggctggccgggcgcggtggctcacgcccgtaatcccagcactttgggaggccgaggtgggtggatcacgaggtcaggagatcaagaccatcctggctaacacagtgaaaccccgtctctactaaaaatacaaaaaaaattagccaggcgtggtggcgggcgcctgtagtccctgttacttgggaggctgaggcaggagaatggcgtgaacccgggaggcggagccgagatcgcaccactgcactccagcctgggcgacagagcgagactccgtctccaaaaaaaaaagaattcgacgtggctgctctccctctggccaccctgcccttccctgccacaccttccctgtatggcaggttatcaggccctgtgtcctgcagggcctttgcagtacagcctggtcatctttggtttttttttttctgattattcatattcattcattgtaggtgatttataaaatgcagagaaccacactgaggaaatgcctgcacgtcccgttatcccacggtcccactgctaggctggaaggtgatggcatcagctcccggccagtgctgggggttggtctgtgttatctgccacctcaccgtctacactggcaggccctggagcatcttggtatagacaggcaggcattgagaaagagtctgagactggagacccctgccatgcgcagtgggaaggaccatcacggtcgcttagcaatgtctgccacgggggtgggctgcagtgggggacacgtgaacgcccatgcctctccctgtgccaagtgacgggaacttggaacatcagtgaggccaagactggtcttgagtaacttcgggtccctaccttctgagtcctagaaccacattctgtttcttggaaggaaacagctataggcttgagttccctgtcaaccctcccttccactgaagtgtgacaaggagcttatgactcggggcacaggctatcgtggaagaaagacgcggatcctgttaacccagtacaggctgctgctgagctcagctgcgtggtaggggagtgagcccaggcaccacccctcgggcctggcacagctgccaggccaggttcctgctgtcgagtgtgcggcttgttggggcctgtggcagtggctccttgatacaaagctcgtttcagtgccctgcctttggcagccttgtctgggcaggacttgggcagcgggaagggctaacgatcggccccggggcctgccgacactctggtttgtttacccccgacctctgctctttcttcctctgtttctcccagcccatgaaacccctgaaggccaccgccaccacctcccagcccgtgctcaccatccagcagatcgagaccatcttctacaagatccaggacatctatgagatccacaaggagttctatgacaacctgtgccccaaggtgcaacagtgggacagccaggtcaccatgggccacctcttccagaagctggtgagtctgccagggatggagggtcctcacgcagggcctcagtggagcccatagtgttgcaggagcctcaggagaggaccgggcagccctctcggactccttgaaggcctgagacctctccgagtccgggaggaaggcctgggcctgtgtgttatggggtgcctggggccggggccttgactctaggcctcccctggtgcagccctgggagcttctggggtggtggagacaggctgtgtggataggtccttccaggggtggtggagatgggctgtgtggatgggcacttctgtgggagcaccatctctctcccggagggtgctccttctccctcccggagggtgctccgtctttcccggacggtgctccctctctctcccggagggtgctctgaggaaccagccctggaatgaaggcttcttgctgggcttcagtctcctgtccctcagtgaacagaggggcacatgccgggttaggggcatgaggactgctcccctgagacctcgggtctgtaaaaggaagcagttgggcacactggccgatgatcctctcctgaggtcccaagagcaggaagcactgaagcccagccctgctcaccactgcagggtcgggagcggcaggagtgggtgggttaacatgcagacctcgtgttgggaaacgttcacagaagtcttctggttccctgtgcttctgtgacaccctctcccccagctctgccccatctctggctgtgtcccctggaggacccccaggtcagactcatggagctccctccccacctctgctacgtaacgtctgaccgcccagcaggcaagagggagactgggagtccaggccgcggttcttctctgggtgtgagtggccagaggaccttctcctccttcctgccctgttctctgggtgtgagaggctggaggcctcctcccctcccctgccgtgttctggctgaatggacagggctctgcctttctcacgctggagaagactctccctctcctgcctggacactcctaggacctctagctgagtgtgttcagagctgagctccctgcctccggcgtcacctgctccgcttcctgtctttacctcaccgagtgcttcagactctttctggctgcaccccctcccccacctgtcctgtggactccactttttggccgttgctcacagccgccttttcctcttcttggccacccatggccctcacctggacagctgcgtatcctcctgtgtggctcctgcctccaggcccactcacctcccacccccacctctccttagaggggagagagtcactgaaacctcgacggccccttcagcggatccccacggccctcggatgaaggtcaggctccgaggaatggctcgagagaccctttgcacactgacccgtgtccagccccagccttggcagcttcctccccgcacctctgtgctcctgacactggactttctgttctcagttcccagggcaggcactttcttaactcttggtacttgaggccccgtgtgcctgaaacgtccttccccctctcgtctggcctcccctggtcagttcccagcttagaagggacctcctccaagaaggctttccaagtcgccaaatgcaggccttgtgccagtcctcgtagtgagcactagtaactgcctgactcccccaaaccacaagttccaggaggacggactgcatttcctttttttgttgagacggagtctcactcctgtcgcccaggctggagtgcagtggcgtgatctcggctcactgcaacctcctcctcgcgggttcaagtgattctcctgcctcagcatcccgagtagctgggattacaggcgcccaccatcacacccggctaatttttgtatttttagtagagacggggtttcgccatgtcggccaggctggtctcgaactcctgacctcaggtgatccgcccgcctcggcctcccgaagtgctgggattacaggcgtgagccaccgcgcccggcctgcatttccttcttcttagactcccagaaccagcccagtggtcactgcttgaatgagtgaatgcaccgtgaccttgaccactgggcctcgggagaactcggaagggcatggagggagacgttgcagggcctgagatttctgtcctgagagtcctgtttctccagcacagcttctagagccgtgtcacaaagtgggcttgaatcccagcgctgccagattaaacctgcaactgggcaacttacccaaccgctctgaatcagcttcctcatctgtaaaaaacaggatagtaacagtatttacctcattgggtgattttgaggagttaatatctgaaaactgcatggggctgagtgtggtggctgacgcctgtaatcccagcactttgggaggctgaggctggaagatcacttgaggcttagagttcaagaccagcctgggcaacatagcaagaccctatctctacaaagaaatagaataggcctgactgagcgtggtggctcacgcctgtaatcccagcactttgggaggccggggtgggtggatcgtgaggtcaggagttcgagaccagcctggcctacatggtggaaccccatctctactaaaaatacaaaaaaattagcagggtgtggtggaatgcacctgtagtcccagctactcagggggctgaggcgggagaatcgcttgaacctgggaggcagaggttgcagtgagccaaaaccacaccattgcactccagcctggatgacagactgagactctgtctcaaaaaaaaaaaaaaaaaaaaatggctgggcacagtggctcacgcttataatcccagcaacactttgggaggccaaggtgggcggatcacctgaggtcaggagttcaagaccagcttggccaacatggtgaaaccccgtttctactaaaaatacaaaaattagccgggcatgataacacgcacctgtgatcccagctactactcgggaggctgaggtgggagaatcgcttgaactcgggaggcagaggttgtagtgagccgagatcgtgccactccactccagcctgggcgacaagagcaagactctgtctcaaaaaaagaaatagaatacaataaagtaaaagaaaaagtgcttggaacagggcctggaacatcataaattaataagtactcaataactggtcattatcatcagtgccattattattattattattattattattattattattattattaaattgggaagaggcaccctggaaggtatccttccaagggaatgccacactctggttctagcatacccccccctgctccctccggttcagggatggtgaacacctgtcatcactgcctgctcacctgagctgagtggcctggggggcatcctctcctcatccctcaggagggtagaggagagcaaacctagggttgctggaaacgctgtcacagtttatctttgtcacttggacctggctgtccccggttctggtcttggctccacaggcctggccgtgaatctgctacccaccactttccctccccagcatcgtgaaccgatgcctgaggcccctggggctgcagatttgggagggcccggggggagccgggtcaggtctggcatccggaggtggtttattttcagccgaagactctgggtatttgattattcgttactgagagaagggaattagcgtctctgctgtttgttttatgagatcactccagtgccaggctgctgtttccaggcaacctgcacttcccagttaatgaacctgccaagccaggcctcgggccctaccgcctggggtgactgtggcagcggcagtccctgagattaccgtgaccctggacgcaggcctccgcacggctggctcctgcccctggctcctgggagggtggtgtgccaacccgggcctccaggctttctccttcttgtgggaaagggggcaagaggagccttttcctggaagaatatcggtgatctgactttggcttaggcagcgactgtctagtatgcctcgtgtagcgtgggcattgatgggccgggcctcagtactccctggaaaaggaaataaactccctcccgtccggccccgcccccttttaaggtcaggccccaccccctttaaaactcaggccccgccctcttttaaaagtccggccctgcccccttttaaagtcctgcccttctgcagctgagacctgaatgcctctggccttggcgtcacgccgggcgtccccactcgcgctcccctctggcttttccagatgccccccgctcccctgccccaccagcttcctcaaagggctctgcctctgtactgggaggctccaggctcagccgatgctgcggccagcctgcccccacccctacccccaccccagcctctctgggtccttggggagcatgaggatcctgcagaaagcagagtggtccggggtgggggtccacagcagcccacttcccccagcaccttggtgggaagcagaggcccctgaggaagccaggcagcagctgtatcccccttgctgctgtattgaaaaacatttaaaccagaaactccaaagaataacagcagaaccttctaatgaagaaaatacagcgtcacacatgaaggtggagtctcccctccctcctccctcttgaagcagctactggcatgaatttggtggatagccttccagactgcagtttgtgtgtttactacatatctgtatctattttgggttggcctgtactttaaaaaaaaaaaaaggtcttgctatgttgtccaggctggacttgaactcgggctcaagtgatcctcccacctcagtctcccaagtagcgagggctataggtgtgtgtaccacagctcccagctgcatgtactttaaaaatgtgtctaagccaggcgtggtggctcacgcccgtaatcccagcactttgggaggcggaggcgggtggatcacctgaggtcaggagttcaagaccagcctgaccaatatgacgaaaccctgtctctactaaaaatacaaaaactagccgggtgtggtggtgcgtgcctgtagtcccagttagtcaggaggctgaggcaggagaatcacttgaacccaggaggcggagtttgcagtgagccaagatcgtgccagtgcactccggcctggttgacagagcgagactccatctcaaaaaaaaaaaaaaaagtgtataagtatacacatatatcatattttacagttcaacccatgttcgttttggagcttgtcagcaatcgtattttacagttcaacccatgttcgttttggagcttgtcagcaatgctatgtgtaaatcgggtgcatccatgttcatggctgtgtgcgcggcttcccccgtttgtgagcatttgttaccagtccctccactatgaggaggaaaagtgagatggtgaacacccttgagtcccctggggcacacacataggccatttgctccagagcactgctgtctaatggaaatagcttatgagccacgtacatcatttcacattttctaatacccaccttttttttgtttttttgagacggggtcttgctcttgtcacccaggctggagtgcagtgatgcaatctgggctcactgcaacctccacctcctgggttcaagcgattctcctgccttgtcctcccaagtagctgggactacagatgcgtgccaccacgcccggataattttgtatctttagtggagacagggtttcaccattttggccaggctggtctcgaactgccaaccttaggtgatctgcccgcctcggcctcccaaagtgctgggattacagttgtgagccaccgcgcctggcccctaatacccacatttttaaaagtaaaaataggcaggtgaaattaattttgagaatatcttttatttattcccgcagatccaaatattatttgaacatgtaatcagtatttaaaaattaacgaggtaatttacattctcttttacatactaaggctttggaacccactgtgtattttacatgtccggcacgtctcagtttgaaccggccgtatctcaggtgcttggtagcctcaggtagctggtggcgactgcactgaacgatacggctctgcagtttgtatgtaaaagtggatttgctaagcaatcgatgggctgtgcctatccacactgttattagttcaactgaaaataggccatgcctattctcagctttattagttattaacaaattgctctccaaataattgtactaatttacacttccccgagtagtctaagagtttaaattggccgggcgcggtggctcacgcctgtaatcccagcactttgggaggccgaggcgggtggatcacgaggtcaggagatcgacaccatcctggctaacatggtgaaaccccgtctctactaaaaaaaaatacaaaaaattagcctggcgtggtggcgggcgcctgtagtcccaaccactcaggaggctgaggcaggagaatggcgcgaacctgggaggtggagcttgtagtgagccgagatggcatcactgcattccagcctgggtgacagagcgagactccatctcaaaaaaaaaaaaaaaaaaaagttttaattggccgggcgcagtggctcacacctgtaatcccagcactttgggaggccgaggcaggtggatcacctgaggttgggagtttgagaccagcctgaccaatatggagaaacgccgtctctactaaaaatacaagattagccaggcgtggtggcgggcgcctgtaacgccagctactcgggaggctgaggcaggagaatcccttgaatccgggaggttgcggtgagccgagatcgcaccactgtactgcagcctgggcaacaagagcgaaactccatctcaaaacaaaaacaaaaacagggagtttaaatttccccatatgcttgccagccgttgctgtcaattagacttttaaattttgacccttctgatgagtataaaatatctcgtgatggctttaatttgaatttctaccctttggtcccttaagaggaagtgcttatatacagcgcagcgaagcctttccataaatatttggggaattgacttatggagcctcggtttccccttttgcagaaaggggcgatggggtctgccctgcctctcagaagaggcgaggctctgtgtggttgtgactcaggttgtgactgtgtgagtgacaggcaaacgtgtagtgaggctggggctttggctccttggaggtagaggaggtggaagaggtgaggacggggcctcaaggccaagggaaatggaaagacagcatcttcatttgttgttttgttttctttttgagacggagtcttactctgtcacccaggctggagtgcagtgacacgatcttggttcactgcagcctccacctcttgggttcaagcgattctcctgcctcattctcctgagtacctgggattacaggcacgcgccaccatgcccagctaatttttgtatttttagtagagacggggtttcgccatgttggccaggctggtctggaactcctgacctcaggcctcccaaagtgctggggttacaggcgtgagccgccacgcccggccaagacagcacctttaaatgtcgttccccacgctgcacgtggggagggaggcctgagcaggccacacgtgccagctccccccagcacacacacccccctctctccctgctccggctaattccaggatgtgaaggaagtatgagacattaagggatttcaaaccctgggagaccttcaccgtgctgaggaaagctggatgctgtgaagagttgaatttctagcaggccaacaaaggccctagcctggtctccccaaccccagaccccctcattaaccttattggctgagctggtttccatggaaactgtccagttcaaagggacactgtaatatgttcatccctgcgtttccccaagttcccaacgagctgagtgagaggttttcagtgcaggggagctcccggtgctccgtgaagctttcatccattcattaatcctctcccctcccaccctcctctccctctgttccctgactcctccctgcaggccagccagctcggtgtgtacaaagcgtttgtcgataactataaagtcgctctggagacagctgagaagtgcagccagtccaacaaccagttccagaagatctcagaggtaggccgctccccacatagccaccctgagggacaaggagctttgggggctgctcagagcccttggtctcccctccctcgcttgccagtcggtgaagtggttactctaatgggtaacacttagcctgatatttgctttcttgcacctgacattttccctcttaatagaaaacgatctattttatttatttttttattattctctttcagattagagagaggaacaggggaggcaaaaaaaaaaaaaaaaaaaaaaaatccaaggcagtgttctcccacaccacactatggtgaccttgagcaagtcacgtcccccctcttggcttttatgtcctgtccggtagaatgaggggtttagaaatggccagataatccttttttttttttttttttttttgagacagagtcttgctctgtcgcccaggctggagtgcagtggcgcggtctcggctcactgcaacctctaccccctgggttcaagtgattctcctgcctcagcctcccaagtagctgggattacaggcgcacaccaccacgcctggctaaggtttgtatttttagtagagatgaggttttgccgtgttggccaggctggtctcgaactcgggtgatgtgcccgtctcagcctcccaaagtgctgacattacaggtgcgagccactgagtccagcttggccagctaatcctgaccttgcttgataagaatcactggggcattgtttaaaacacagatttcctggcaccttccccggagcttctgattcagaaggctttgcgtggggcccaagattctatatttgaacaagcttctgggtaatatttatgacagggaagtcttgaggaaatttggactataggtcgtcttttaaggttcttgccaactctaagactgccatcccataaacacaaaaagggtaagagccacttatgtggagaaggagccttagaatccctggccgggaacacgcgtgcttctgctcctgaggcccagccttcctggccaggaacacgcgtgcttctgctcctgaggcccagcctacctggccgggagcacacgtgcttctgctcctgaggcccagccttcctggctgggaacacgcgtgcttctgctcctgaggcccagccttcctcccgcactcctccacagggcagaggtgcagtcctatctgccatcaacatttctacctaagaggtggcatggagggacagttgcttaggatccttcaggacagagcccagttcatccctttgtccaaaaagacctcagtggcacccctgaagcactggcctgagaggaacagcccccagctcagggcaagagaacctccatcctagaaaaggggagaagcttctgcagttttgggagtcctgccgtaaaggcccctcttggccctttgtgttcccgtctcagctctaacgctagaagagttggggaaacgcagggtagttttcctgaaacttcaggggtgacggtcgatgcccacgtttagaatccaccgagaggcagcagagaagctgacagttggagatgaacatgtcaccttcattactgttaaaaaaatgcagcttggaaaatgtggatttggatctgtagccacagtgggcttgctgacacttcgcctctggaatgaaacgtacctatagaagccgggcgtggcggctcacacctgtcatcccagcactttgggaggccgaggcgggcggatcacctgaggtcaggagtttgagaccagcctggccaacgtggcgaaacgccgtctctactaaagatacaaaaattagccgggcgtggtggtgcacacttgtaatcccagctatttgggaggctgagacaggagaatctcttgaacccgggaggtggaggttgcagtgagctgcgatcacgccactgcactccagtctggtgacagagcgagaccctgtctggaaaaaaaaaagtatctattgagtcccttgcaggaataggaaaacacaggcccctctccacaatgaggacagagcccacgcctcttacccagtgtgcagagagaggatggctgaccatagtttcttctcccagacccatggagcagatgtgtcaccctctgcctgggaggacgaagtgcagggtggggaagtccctctccatggagtcaagtggctggagaggccaggtgcagtggctcacgcctgtaatcccagcactttgggaggccgaggcgggagattggcttgagcccaggagttcaagaccggcctgggaaacatggtgaaaccccgtctctattaaaaatacaaataaaaggggctggagaaatggtgctttccctgcggtttccagcccaacccaggaactacctggactcccctggtctgtgttcagatcagccctgccaaggccgcccaagatcccggggtcagacatggtgcagagagtgtggggtcttctcttggcctgggctgattgcctgttctctgtgcctaggcagaaacccccacacccaaccataagcccctcacagcctgcccaccctggagggcagagccaggcccctggctttctgccaggtggcttctcatcctgactcactcgatgacgtgcttgcttcctgctgaggctgccacttaattactgcaattaggctcctctctgcagcaggagtgatttcataccctagacttcactggagggggcgtgaggaaacattcccgaaatctgggagtccaggcaccagccagagacacaggctggggacgctgagtatcccccacccccccgccccccaaaatatacacacacccaagctccatctccaggagttttctctgtctagaaacagcttgagacagaagtaggaagttcctgctgtctgagcgcttcctcccctgcagaccaagcaggtggcatcacctcggcagctgaccttggcctcatcacctgggcagctgaccttggcctcatcacctgggcacctgaccctggcctcatcacctgggcacctgaccgtggcctcaccttgcctcctgccttccctcccacacccctctttgaggctccgtgtgctccgtctgccaagtggggatggtattacagctccagttgcaggctgcactgtcctgttagcaaaagctggggctggaacgtctctaaaggaggataaagaggcttggagcagatgagtcatcccgggggtctttccagtactcactacctgctgcctggcttgggatccaggaggggcattggctgttcctccctcgaagcttcctctcggacccccagcatgggcagtggtgggtggggagtgtcgggggtgctgggggctgagtaagtgctctctgatgggggtaggatgcagctcactgtcctggggagctcagcatctctgccgaaggtccaccacttccctgctggcgtgtgggacccttccttcctacctcatgggttcctcatgccctaaagattggctggagtacctggcgctggtcaactcaaaccctgtctgcccttggccgacgtgtagggttcctgagtcggggttcctgtaatcacagggctccctgccagcctctctcatctctgggacctggagtcccttccttcttgcccacgccccagccactggactccacgaggctccaggagttcacaggtgtggtgcaggggattggggtggcagaggcagcccatggccatggggctcctttgtctttctttttttttttttttttttttttttttttttttttttttgagacagagtctcgccctgttgcccaggctggagtgcaatggtgtgatcttggctcactgcaacctccgcctcccaggttcaagcgattctcctgccccagcctcccaagtagctgggattacaggcacctgacaccacacctggctaacttttgtatttttagtagagatggggtttcaccgtgttgaccaggctggtctcgaacttccgacctcaggtgatccgcccaccacggcctctcaaagtgctgggatgactggcgtgagccgccacacccggcctctgttctcatatgtacaccctgagtttcagaactccccttcttgccaggctcacagtgggggctgggagaggtgagggacagaacaggccatgactcctctcctccctttggcaggaactcaaagtgaaaggtcccaaggactccaaggacagccacacgtctgtcaccatggaaggtacctcggggagcgggctggattacaggcacctacctttgtctggctgtgcaggcaacaggctgcgtgaacgcggcgcccttccccttgtgtgtgcgtgtgtgtgagcgcgtgtgagcgtgagcgtgtgtgagcgcgtgtgagtgtgagctgagtgcgcgtgtgcgcgcacgcgaggactctagcctcgtgcccaggcagccagccagctacaaacgtgctcctctttaggatgccagcaggctgctggctccctccctccctacccctcctccccttccccttccctcctctcctcgccacgcgcctccctcccctcccccttgctggaagagcactccggagcggctgcccgatgctggagtccgtgcggcagcatcagcaaggtggctgagtggccgggctgctggtgggcgccggggagcctggagcgatggctgcacgctcccgccgcggggacagaggctgccatggagattctcctcattattcgcttctgctgtaactgcacctatggtaacccaggtgctcgctgtgggaggtggcggaccctcccacctctgggggccggctggagtgggcttagatgtggccggggaggttagagggccgcagggaaggagggtgggcgagcggctggacctgaattcccccttcgttttggcggcatccagcctagagttgaaacctgggggctgctcagagcagggccgcttgcaaatggaaggaccaggctggaggggtccaggtggccccgaggatcggtggggaattggtgggctagtgtgagagaacttcctggaggggctgttagggagagacggcgacgagctgtgcccgcagacgtagtagccctgaggccagggagagggtctgcgggggccaggcacagcgtggcgatgggtggcgatggtccggacggcggcgttgccagccgagagggtgccagcgcgagccagagggagaagttgggagtttctttgtttctggagagaggcgcggaggctgggcggcacggtattgtgtgctccgcgcacatgcagcagtaggcggaggacacggaggggctgtgggagcaggaaggagaggtttgtttccagccgtgagagacccccagccgaggtctgggccctcaactgtggaaggcaggtcggcagggccagcgggagaggggtgtggcaagctactctgtgaaggtcacacacacacacacacacacacacaccacctttcggtggaagggacccggaccatcctccttgcagctcccgcagctggctgggggctggggggaagtcccgggacaggtgcatgtcatcaacacgactgtcggtcgtaggaggatgaagccggcccaggtagggaggtgtccagaagcccgtggaccctgcctcaagaggcaagacgtgccaaggggtgccctgcctgcctgtggcagggagtggggtgggcacgtgtggctcccaggccggctgctctgggcctgagtctgtgggagcagcaggcggctggttttaggaccttcctcttccttcccaccaggtgtttcggctctgcacccttctcagtcactttgctttcctatctccctggtaacctggagctccttggagctccttgtcgaaggctgacttgagggggatggtggcttgccggaagagagatggcaggtttcctgggctccttcccaggggcggctgtgctggaggggctgtgtggggccagtgccccctgaccttctcaggaccctcttgatggaagcaagctctgaggcagcctctctcctgcggcccagcagggcggctgcaggaaccctgttctcacttgaaattggcctggtcagcgatcagaggagaaatggtctttttggtctggcctaggagttggtcaggtcttgactctgcctccctgaaaaggaaacgtacccttggcttcctctcccttccccaaaaggaagcttcgactcagtgaaacggacctgggacctggagttcacgttgcttcggtctccgtgatactgttgttgaagtcggcttcaaagtggggaatgaggagtgaaagggccagctcgtgaggagggggctcaccccatcctggtcactctttccaagaacgctcctgtggttcattgaggttttacaggtgctgcctttccctgaagaaggtgcagctcaaagcaaggagtgcgggtggatctacccagctcccaccacttgtagccacaagtctctggcctcagttgccttgtctgtaaaatggggctagtgagaattgcttcccgttttaatcacaggaaataatgagagcaaagcagttaactcagtacccttgggcacagagcgagtacccagcaaactagagagagaccagcttgctgcccaagtcagtgtcagtggagagggagagtgggtgaggccgggcaggaagcaggccagcctgcaggagcccagggacaggggaagggccagagcgagtgcctcaccctgagttctcaggggaccccagcgtgcaggggccgtggggagcacaaacttcagggccgctcttattcccccggttccctccgtatctgatgtggtcccagtgccgccaccccccccacccccaccccccccgtgcacctgccctcctggccgcccttccagggctcattccacagccttactcaggtggactctggaggtgaccacagacatgttaataacccctctgaaacccaacctgccatgtgttcagacctctgagcttagtcagaaacctcttcctcttgggacccaagagagggctgcggggagccgataatgcagtgtcagctttctgtggagccgccactccggagcccaccctggcaggtgtctgctgagcttgtgctttcttttgggtctctggggttctccagtgtgattttttccccctgaagatgggctgagccacaggtgggtgccttaaacagcctcagaaatggatcccacctgagctaggacctgggctgcaccctcagtgccgaggataccccaagactggcctcattccttcaagcttccatggcccatggggagggtctctggaaactgctagataagaaagggctacagatatgtcatatgaagtgtatttacgtaaaccagtggttggccgggtactcatgcctgtaatcccaacttttggcagactgaggcaggaggattgcttgaggccaggagttcgagaccagcttgtatttggcttgaggccaggagttcgagaccagcaacatagtgagaccttgtctctatatttatttttatttaaacgaagactcactgtgtcgcccaggctggagtgcaatggcgcaatctcagctcactgcaacctctgcctcctggattcaagagattcccctgcctcagcctcccaagtagttgggattataggcgcctgccaccacacctggctaatttttgtatttttagtagagatggggtttcaccatgttggccaggctgttcttgaactcctgacctcaaatgatccacccgcttcggcctcccaaagtgctgggattacaggcgtgagccaccctgcccggcccctcgtctctatatttttaaaaaaattaaaataaatacataaataaaacataaagcagtggttttcaaccattattatacattcaaatcagtaaagaagctttatagaaatgctgatggcccttgtggtcttgcagagatttgggttgagttgacggggctggggagcagcatctgtatcttttaaccgctcccccagtgattccgacaggcagccaagctcggactgcgggtaaggctggtggccctgctgaggctgcattttcttcacagccagcagattgctccctgaagtgtctgcttagccgcgcacggggtatttatatctcaggctttggagaactatcaggtttggggcccggctagggcgtgcgtgttcacgctgggacctgtcacaacctggtcttatgggacacccagtctgggatccttcttcccagatgaccaacctgcctctgtcactgcccctgcggcaggaggcccaaggtcatgaccccagggacagagcatccaggtgcaggactgaagctgagcctcctgttgggagggtgggcgcagccgcgtacaggaagggtgttgggaagtgttgatccaccagctgccacctccacctgtccctgctgaatcccagccatcctcacttggtgtccgggttgtggagggtgtggctcttgggggcctgggctggccttgcctgcgtcctcccagcctctttggggctctcatatgtgaggcctaacctgagttgcttcaggaaacctttgcccctcaggctgccacgtgtttgagagcacagccttttttctttttttttgagatggagttttgctcttgttacccaggctggagtgcagtggcatgatcttggctcgctacaacttccgcctcccgggttcaagtgatttccctgcctcagcctcccaaatagctgggattacaggcatgtgccaccacgcctggctaatttttgtatttttaatagagatggggtttcactggttggccaggctggcctcggggagcagagcctttctgtggagatcaggccagcctcctggcctccagcctccctgcctccagccttcctgtgctttgctatctggggtttgaggatgtggggaggggtctttcctctgagagatgaggccagtcctgtggatcacagtgaggcatgccaatcccagctggctgtgcctggccttcagctccaggagcctgagaatgataaggtctggagagctgcccttcctggaaacacagcatgtctccttcccccattctggggtcctgcatgtggcaggtgtgctagactctgcagggcatggctgggtggagctgtgtgattctggggttctgcgtgtggcaggtatgctggactctgcggggcgtggctgggtggagctgtgtgattctggggtcctgcatgtggcaggtgtgctagactctgcagggcatggctgggtggagctgtgtgattctggggttctgcgtgtggcaggtgtgctggactctacggggcgtggctgggtggagctgtgtgattctggggtcctgcgtgtggcaggtgtgctagactctgcggggcgtggctgggtggagctgtgtgattctggggtcctgcgtgtggcaggtgtgctggactcttcggggcgtggctgggtggagctgtgtgattctggggtcctgcgtgtggcaggtgtgctggactcttcggggcgtggctgggtggagctgtgtgattcagggctgggggtccaggagagcatctgccttgagccaggtgaggccaggacaggcctggggaggggggcggggcggctctcgatgaagccatgtctgatgggagaggaggcagggctgcggagggagcaggggctgccagggctgtgtgtcacctgtgtctgctgtttggtcggcccggggagtgagaacagaggtgggggctgccgtgggctcactctggtgtccctcgaggggtgttcacgtgggaagcatgcgggtggggggacgaagctggtctctggggtgttgggttgccctcgtccatcatcctcttcctccttctccctgtctcccccgacagctctgctctacaagcccattgaccgggtcactcggagcaccctagtcctacacgtgagtgtcaagcctccgaatggccagagagggcttaggagttcagtggaagactgagcctgggtgagagggtgctggagtcaccgagaacagtccacctggggaatcaggggttcctaggctccaaggatgcctgtctggcccgcggtatccatgccgccaggctagggcctgaatacagcttggctactaagcttgacgtggccaggtgctcccggggaggcaggcattcctgcttccccacccgctgcctcctggtctccagtgtccttggagcagctgcagggcagacacagggtttctctcccagctgctcggggggatgagcctccacctggtctccacactggggagagagtatgactgtggccaggagaagagggggcagccagggccctctcccctgctgtgctggctctgattttttttttttttttttttttttgaggcggagtctcactctgtcacccaggctggagtgcagtggtgcgatctcggctcactgcaacctctgcctcctgggttcaagcaattctcctgcctcagcctcccgagtagctgggactacaggcgcccgccaccacgcccagctaatttttatatttttactagagatggggtttcaccacgttgcccaggctggtctcgaacttctgacctcaagagatcccccgcctcggcctcccaaagtgctgggatttcaggcatgagccgccgtgcccggcctgactctgatttgtagttcagattttgcgggaattaggcaggtccctgagtgcccaccctttggatggggactgagcactccccggtggccacacatcaggccccagagccgctcccctcaactcaccgcctcacccttcccaggacctgctgaagcacacacctg

SEQ ID NO: 15344 - DNA, 34754 bp, Homo sapiens
gccccaaggctgccggcacggtgatcttcgtgtctccaggacgccctgcggtgccagctcccgctggcccgcacgagtgctgaagcttacccctgctctgcgatgagtgtgagaggggtgtccaccccccgctggcggccccagcccaaggaggtccaccacagccctcgggagcaacactgccacgttctccgttgccagtcgtggtgggtcagagctggggagcaaacaggccaaggggcaggggccggtttgtgggagggtccctcctatagccatgctggtggggctggacgcaggggcctttccgaggccgccctcgtaacccttttggaaaatgtgaagccctgagctgctgacctgcacaccccgctcgctgcactggctcagcctcccctcccaaggtgggtgggctccgtgcctgggctctggagcccaagtggtgctggcagccctggggggttaatgcggctcaacttcccggtcgcctttccttccctcctcctttgaaggaagcccacactggggtgatagaaataagcaccggctccgaggagtctgctgtgagcccctgtccctgccaggcctgggcacagcctcctcgcccacgccctgctgccttgggctccgtcctccgtgcggggccttgttctgagggctgagggctcccctcccacactccagaacctgccctggacccctggagggagtgggctcagtacaaatggtacccaaggaggagggccacaggaagtgacatcgaccggccccccccacctccttattccctataaaaagcaaaatggtgactcagagaggagagttggaagcgtcctgcctcttgctcccactgttaatttttacacttggaattaggcagaaggcaaagaaaacagcagcttgaaatacgcggctgacatgctcttcatcgggtagcaacagcagagccgctcctccccgcctcccagcagccccggagcgggcagggcccggtgcctgctggctctcccccgcccctcaccaggcccaggcccccgcacagcccccgcccgggccaggcgtggatggtgcggccggggccatggctgccgggggccgccgccggcgcccactacgctaccagtccctggcagctctggtggaggattctcagtggcctttcttgttccttgtctcagacttcagctacgggacggacgagtacgacggagaggggaatgaggagcagaaggggcccccggagggctcagagaccatgccgtacatcgatgagtcgcccaccatgtccccgcagctcagcgcccgcagccagggcgggggggatggcgtctccccgactccacctgagggactggctcctggggtaggtacaccggcttttctttctgggtttggggaggggtgacgggaaggcctgggcatcgtgggccaggccctgcttgggttggtctcgagagattgggactggagacgtttggacctggccgttcttggtgcctcgtcatctcgtcctggccctggacccctctcaggctcgggcttccctccccacctgctttgccaacgctgccgcccctgtctctccccgtctactagccgtctgctccccaggcctcccagacccctccgtgcctctttcagctttcccctgttagcctgtctcctccagaggacccaggagaggaccaggctctcctcccctctgcacccaggccaggcagtggctgcatgcgtggcccgtgggctccaggtgttcagatgctgctcccgcaaagccagcctgggcctggtgctccctgtgggtgcaatgagctgcccgctccagccctcctctgttcactctggaagggaacaaactctgatggcatccacctctccttgttgacagagacaagagttctgctccagagagaagcattgtagaaggaatattaagtatgtgctctgagacaggccagggatagaaactgtggagggtttgcggtccttgtcattaacgtgttcctggcgacagggactgacgctgtctgagcgcagctcgtgtgtgcctgtcggagacacatgaacgagcaaaacagaggttctgggggttgtttgcctggagctggtgggggagaagaatccaagccggtcctctgtggggggtgtgtgttgcaggaggcggtgggagtgccccatccttgcttggtcctgctcgtccgggtgtgttttgtagggggtctccgtcctgccttctgacgtccccagaggagcagtcgctgagatgccacgggctgcctcttcttcctccaggggctagtgcccccccaccccagctgaggccgcctgaaccctcccattcttgagaaccccctgctccttccagcccccccggccaccctccaccccccacagagctctcacccctcttcacacaccggggtggctgttatagcctttggcaacaagggccttggcaacgggcttcccacttgggggaagccacattgctgccatggcaacagaggccgaggccgagtttagcggcagtccaggcgtgcacctgtgggaagggctggcggggggcaggtgggaggcaagggggccggcgagggggttggtcagtgtgttgttgacctgccctaagacgggaggcgggttagagacaagcgtctcggacctgcgggggcagggtttttgccctggttctcctggaggcattgggctcagggtacaaatagtaacccaaggaggcagagcaggtgttcagggacctgaacgggggccaaccaggggagagcaaggaggagaagactctcgctcccatctctgccttcagctctcaaaccacagcagggctcagagccccgcccggggggactcagctctcaccccactgtgagcagctgcaggaagatgctgcggaatcccggtgtggggccagggtctttgccgctgcctgtccccgcgccacctccctctttgctccctgtccctgtgccctgtccttgtcgcgtgaccaccatgactggtttccgtgtccgtcgattttccgattcctttggtgctggcaggtgccttctctcgggagacagatcacgggcgtcacgcacagatgcccccgcctggcgctccggggcttcggggcagaacttgacttggtggctgtgcgtcttgcttggtggctcacgagggactcacttggcttgaggaccttgaaatccagagatgctagagtgactgccccctaaagtgcttgtggcccccagggttgatgtttacaccatcgactagaagccacgcaaggcaggagtagggagcacttgtccagcctggggatcgtccgggcaaaggtcccatccgcggcacctgccttccctcctcagggagcgtttctgccctttctgctgggtcaccggccccacctagtggactctgcagggattgctgtttacacggggtgcctggagggagctgacgcctcttcctgagtacttggggatgttttggttaaaaacactattaataaaagaccgaggtttctgcggcttggctgtgcttatttggccaaacaggtcccctcccctaccaggcttcctgctggggccttgggaacaggggggacttctggaccaaatcagacaattgttgtagatattcagatatctggcttctggcaccgccttatcgctgggccttccacgcccaaatatgcagccaacgggaagcccaaggttgagtctttgtgttagtcagtgttctctagagaaacaaaaccaacagggtgtgtgcgttatctgtatctatatctacatacgaagaaaagtattagaaggaattgattcaggtgattatggaggcttagaggtcctaatctctgcagtcaatagctggagacccaggacagccaatattggttccagtccaagtccaaaggcctgagagctaggagagccagggatgtaaattccagctcataagccagtggactcgaggctcaggaagagccagtgtttcagtccgagtctggaggctggaggaggccaacatcccagctcacgctcaggtagtcaggcgagaggagcttcctcttattctgcctttttgttaattcaggtgttcagtggattggatgaggcccacctacactggggaggagtctttttactcagtccaccaatacacatatcaacctcatcccaaatgcctcacaaatatgtccggattaatgtttggacaagtatctggacaccttgtggcctagtcaggttggcctagaaaatgaagtgtcatactattattccttcagccacccaggatggaaagcagataagctttgcgcagatgaaaatctattactctcaggctgggcgcggtggctcacgcctggaatcccagcactctgggagactgaggcagccagattacctgaggtcaggagtttgagactagcctggccaacatggtgaaaccctgtctctactaaaaatacaaaaattagccgggcgtggtggcacatgcctgtaatcccagctactcaggaggctgaggcgggagaatcacttgaacctgggaggtggaagttgcagcgagccgagatcttgccactgcgctccagcctgggtgacaaagcgagactccatctcaagaaaataaaagaaaatctactctttagctgtgagacattgggcaagtgtcctcataccgctgagcctcagtctccttgtctctagatagctctaactcccctgaaaggtagtggggaggaggccccactgtgagcagctctcagaccacagcagggctcagagccctgccttggggactcagctcccatcccactgtgagcagctctcagaccacagcaaggctcagagccctgcctgggggactcagctcccatcccactgtgagcagctctcagaccacagcagggctcagagccctgccttggggactcagctcccatcccactgtgagcagctctcagaccacagcagggctcagagccctgcctggggggactcagctcccatcccactgtgagcagctgcaggaagatgctgcggaatttcagcatgaggggaggcctgcagcattaggcctggctcaccaaagtgcacagcccttggccaccagggcccacaagacttttctcgccaggtttagagggctggggagccaacagcattaccactgcaaagaccaagtctgatcaatatctgctgcaccatgaccgaacctgcttttgcaatcaacctcctttctgccacatggggtggccccgggtgaagccgggtctctgcggtgttggcaggacatgctcctctctccccagcacgcccttccacagccttgcactctgcctttgtcttcttttgtgtccccaagacatggatcccacagaggtattagggtgaaacctgaagccctgccccataaaccctgcccaagtccaggctgagcagggcagcacggcagggccaggcccacagaccacgggtggctccattcagcggagactgcccagtttcactctgagaagaaagggccaggactcatctcagctgacaagtgggggtgtaggttcctaaggcaggaccatggtcttacagaaaacccgcctccccacaggccacagactcctctgtctgcttgcctcttgggaagcttagtaaaaaggggctacaaggcagagagaagaactgggttttgtccccactctaccactgtctcactgtgtggcctgaggggtgtcactcatgactccccaccagagctgcagtttgctcatctgtagtgtgaagacactgagaatttcctccctcctgacctcacagggctcaaacctcacagctgttgtgaggtttctgtgagatggtgtttggcagaatgctttgtcaatgtaaaatcgaaacaggggattagactccagcctgcaggagaacccaaagataagggtggaggcgaattgaaatcctcaccattggccgggtgcggtggctcacgcctgtcatcccagcactttgggaggccgaggtgggtggatcacctgagatcagtagttcaagaccatcctggccagcatggtgaaaccccgtctctactaaaaacatacacaaaaaattagctgggtgtggtggcaggtgcctataatcccagctacttgggagactgaggcaggagaattgctagaacccagtgggggcagaggttgcagtgagctgagatcacgccattgcactccagcagccagggggacagagtgagatgccatctcaaaagaaaaagaaaaaaaggaaaaaaaaaatcatcatcattgtccctatcatcctcttcctcctcctccccctcatcacagctgcttagagaggcttgtgctgaacctttcacgtgttggtttcatttaagagccccaacaactctatgaggtaggtgctataaccatctccacattacaggtgcgaaaactggggctcggagaggtgacgtaatttgcctaagattagctgggcatggtagttcactcccataatcccatctacaaggggaactgaggcaggaggatcgcttgagcccaggagttggaggctgagaggtgctaggatcacgcctgcgaataggcattgtaccccgcctgggtgacagagcaagactccatctcttaataatagctattaatattattgtttgtccaagaccatgcagccagtggggcagcgtgttattgaaacttgggtttctatgatgccagagcctgcacagcgctgtcaggtcccgctcacacgccctcccttgtgaagctttcacacccaccccgccgctgatcctactgcagtttgggaggtgtgcacggtcacttgtggggtgcatccgccctgtgagatcaggaccttaatccctgatcatctctgtggaccccagtggaagcttcttggcacctaggggttctcaactggtatttgtggaatggaaccaagtagttctgggatgttcagtcaggaggaagggaggagcaaggaaggctcaggcaataacgctgggaagaactcaggctcagggataacgctgggaggaactcaggctcagggataacgctgggaagaactcaggctcagggataacgctgggaggaactcaggctcagggataacgctgggaggaactcaggctcagggataacgctgggaggaactcaggctcagggataacgctgggaggaactcaggctcagggataacgctggggaggaactcaggctcagggataaagctggggaggaactcaggctcagggataacgctgggaggaactcaggctcagggataacgctgggaggaactcaggctcagggataacgctgggaggaactcaggctcagggataacgctgggagaactcaggctcagggataacgctgggagaactcaggctcagggataacgctgggaggaactcaggctcagggataacgctgggaggactcaggctcagggataacgctgggaggaactcaggctcagggataacgctgggaggaactcaggctcagggataacgctggggggaactcaggctcagggataacgctggggaggactcaggctcagggataacgctggggaggactcaggctcagggataacgctgggaagaactcaggctcagggataacgctgggaggaactcaggctcagggataacgctgggagaactcaggctcagggataacgctgggagaactcaggctcagggataacgctgggaggaactcaggctcagggataacgctgggaggactcaggctcagggataacgctgggaggaactcaggctcagggataacgctgggaggaactcaggctcagggataacgctggggggaactcaggctcagggataacgctggggaggactcaggctcagggataacgctggggaggactcaggctcagggataacgctgggaagaactcaggctcagggataacgctgggaggaactcaggctcagcgataacgctggggagaactcaggctcagggataacgctgggaggaactcaggctcagggataacgctgggaggaactcaggctcagggataacgctgggaggaactcaggctcagggttaacgctgggaggactcaggctcagggataacgctgggaggaactcaggctcagggataacgctgggaggaactcaggctcagggataatgctgggaggactcaggctcagggataacgctggggagaactcaggctcagggataacgctggggaggactcaggctcagggataacgctgggaggaactcaggctcagggttaacgctggggagaactcaggctcagggataacgctggggaggaactcaggctcagggataacgctgggaggaactcaggctcagggataacgctggggggaactcaggctcagggataacgctggggaggactcaggctcagggataacgctgggaaggactcaggctcagggataacgctgggaggaactcaggctcagcgataacgctggggagaactcaggctcagggataacgctgggaggaactcaggctcagggataacgctggggagaactcaggctcagggataacgctgggaggaactcaggctcagggataacgctgggaggaactcaggctcagggttaacgctgggagggactcaggctcaggcaataacgctgggagggactcaggctcagggataacgctgggaggactcaggctcagggataacgctggggagaactcaggctcagggataacgctgggaggaactcaggctcagggttaacgctggggagaactcaggctcagggataacgctggggaggaactcgggctcagggataacgctgggaggaactcgggctcagggataacgctgggaggaactcgggctcagggataacgctgggaggaactcgggctcagggataatgctgggaggaactcgggctcagggataacgctgggaggaactcgggttcagggataatgctgggaggaactccggctcagggataacgctggggaggactcaggctcagggataacgctgggaggaactcaggctcagggataacgctgggaggaactcaggctcagggataacgctgggaggaactcaggctcagggataacgctgggaggaactcaggctcagggataacgctgggaggaactcaggctcagggataacgctggggaggactcaggctcagggataacgctgggaggaactcaggctcagggataacgctggggaggaactcaggctcagggataacgctgggaggaactcaggctcagggataacgctgggaggaactcaggctcagggataacgctgggaggaactcaggctcagggataacgctgggaggaactcaggctcagggataacgctgggaggaactcaggctcagggataacgctgggaggaactgcagcctcttcttccctttcttggtctcttcagaaggcttagggcttgggattcgaggttgctggtaggtgcgtgaagaggcggcatggcagccaggaactcctgagatggtgcctgctccactccctcctgactgctccggacctgggttgtgtggttcagggactcctcgagtttcagcctccgccccccagcagccggcccctgcatttctccccttcctggatcttgggtccctgctgcaaagagaaggacacgagctggaccctcccgtgtgccaggtgctgtgctaggagcccaggggctgccctgccacccaagtcctccagccatggggctgcccccgtttagtagatgaagacactgaggctcagggtggctcctgggcttgtcccagttgggaaggaggtaagtcggaagtaggtagactagtgccttggttgtgaccctgggtcccgtcatcgctggctcccgtcctctctggccctcctacattcacacctggctgggatcttgctcacctctgcatactgttaatcttccctgatgaaccacacctggctggcctggctcatcccacagctctcacgccctgtctgggatctccgtcttctggctagctagcagccctagagttgatgccgtaattacccccattctatagatgaggaaacggaggcacagggagactagatgacatgcccaggtcacacagttggcaagaggcagagctggggctcacatccagagtgcaggggagttttctttctgttttagtttatttgtttcactgtataaacagtgttgtgtaccggcttctcctcaacattagctttattttattttatgtaatttatttatttgagatggcgtctccctctgtcacccaggctggagtccagtggcgcaatctcggctcattgcagcctccgcctcctgggttcaagtgattctcctgcctcagcctcccaagtagctgggattacaggccaccacatccggctaattttgtatttttagtagagatggggtttcatcatgttggccaggctggtcttgaactcccaacctcaggtgatccgcccgcctcggcctcccaaagtgctgggattacaggcgtgagccacctcgcccagcctatgtattttatttttttgagacagagtctccttctgtcacccaggctggagtgcagtggtgtgatctcggctcactgcagcttccgcctcccggggttcaagtgattcttctgcctcagcctccctagtagcggggattacaggcacccgccagtacgcctggctaattttttgtatttttagtagagacggggtttcaccacgttggccaggctggtcttgatctcctgacctcaggtgatctgcccgcctcggcctcccaaagtgctgggattacaggcgtgagccactgcatctggccaacattagctttatgtagttgaactatgtatatgattttggagtgacctgtactagaacagagaggaggcagagggaggagcaaggtgatctggaaggtgacgaatccagtcccatctgtggctgcagttagtggctgcaactgccctggcacttgccctttggtgtcagttcccattggctgaagagctactgagcttcatacagtctggaggtggggcttgagtttctgccaggaaagctgggagagccagggagaagccaagaggcgggagaaagtgcttcaagccgaggacctgccgttgttaaaggcctggaagtgagaacgtgccaggccctttgagaggttactgtcaacagtgagatgggtgagtcatcagctggggccccacggctcttgtttgggctggcttggtggcttcctgctgggcatagagtgagcagtgttttagaaagagtcatctgatgtcagcaggagggatgcaggatgaatgtcctgtcacacctgtcctgaaatcctccagcaccttcccttcgcctatggggccccccttccctttgcacagctgtcaaggccttgtgtgacctgacccctggaccccctgcctacctctgtggcctcaggaccaactccgtgctagaattgtgaactctcacgagagagagattttgtcggttttgtaacaaaacttgctcattgcagtctctggtgccgagaactgtgcctggcacacagtaggtgctcagtaaatattagctgaatgaatgcatgaaccagccagactaaactcatgtcattgtgcctcacatagtctctctcctgtctgttccccagccccaccagcatctctaaccactgctttttttttttgagacggagtctctctctgtcacccaggctggagtgcagtggcgcgatctcggctcactgcaacctccgcctcctgggttcaagcgattctcctgcctcagcctcctgagtagctgggactacaggcgtccaccaccacgcctagctaatttttgtatttttagtagagacggggtttcaccgtgttagccaggatggtctcaaactcctgacctcaggtgatctgcctgcctcagcctcccaaagtgctgggattacaggtgtgagccactgcgcccggccataatttttttttttttttttgagacagagtcttgctctgtcgcccagactagagtgcagtggtgtgatctcagctcactgcaaccactgcctcccggattcaaggaattcttgtgcctcatcctccagagtagctgggattacaggcctgtgccacccctcctggttaatttttgtatttttagtagagacagggttttaccacgtagaccaggctggtcacgaactcctgaactcaagtgatctacctgcctcggcctcccaaagtgcgggattaaaggcgtgagccactgcgcccagcctaattttttttttttttttgagacagggtctttctctgtggcccagtctggaacacagtagcacaaacacagttcattgcagcctcaatatcctgacccaagcaatcctcctgcctcagcctcccaagaagccgggaccacaagagcatgccaccacactcagctaattattttttaaaatttttatagagatgaggtcttgccatgttgcccagctggtctcaaactcctgggcttgagtgatcctcctgcctcggcctcccgaactgttgggatttcaggcgtaagccactgcacccggcctatatgtatagtttattcgtggacacaaataaggaaaaatgtataactaactcttagaggctccctctgtcagagggaaccagaggagactttctctttctttattatgtgtgtctacagagttagaattgttagtgatgtaacaggaaaataaagaagttaaaatagaagtgccacgattgggaacgtagagtgggctctgagggcaccagcgggcacatctgacgcagccaacggggagtcacgggaggctccctggaggaggtgacgtttaaagtcgaatctaaaaataagcagtgggccaggtgccgtgtctcacacctgtaatcccagccctttgggaggccgaggcgggtggatcacctgaggtcaggggttcgagaccagcctggccaacatgatgaaaccccatctctactaaaaatacaaaaattagccgggcctggtggcgggttcctgtaatcccagctacttgggaggctgaggcgaaagaatgggttgaaccgaggaggcggaggttgcagtgagctgagatcatgccactgcactccagcctgggtgacagagcgagactccgtctcaaaaaaaaaaaaaaaaaaaaaaaaaatcgcaataggtgtttccatgttatcccttccagaaaagtggcacctcagctgcagagttctgacactgctcccctccccagtacggccttgcccctcccttgacactgccttgggagtcagtcaccaggtcaatctgtccctgagactgtcagctccgcgagggtaggcacggggttccctgtccatggctgcattccgatgctagcacactgcctggtgcacagcaggcggctaacaaatgcttgctgattgggtcaggcggttaacaactgcttgctgattgggtcaggcgttaacaaatgcttgctgattgggtcaggtggttaacaaatgcttgctgattgggtcaggcgttaacaaatgcttgctgattgggtcaggcgttaacaaatgcttgctgattgggtcagggaaggagggaatggagggtgggtgtgggggaagactgtggggagtcaaccattggagactgagatttagacttgatggtgtcagaaatctcagtggctgcgaaagatttcaaacagtagctaggtgtggtgtgtgcttatgcccctcaccctccatgatgctgttcagcccacttctccaagttcatcttctgtcctctagcaagcagcgcttcttaacctgccttccttcctctcttccttccttccttcctccctccctccctccctcaagacagagtctggctctgttgcccaggctggagtgcagtggtgcgatcatagctcattgcagcctccaactcttgagctcaaacgatcctcccacctcagcctcctgagtacctgagatttcaggtgcgccactgcaaccgggttgctgaagctgcttaaccctttcctttcgggccttctcttctttgcctggaaacccttccctatttccagatgctactcagaagccactgtcctgtgaagctttcactctcaggcagcgttagtgccactgtcctccatccccagggtggctggtaaacgagaacactgcctcgtgtgttcacacgtcctcaccccagacggatcgagagcctgagaacggcaagggccccgtctcccagcctcgtatgtgtgccatgccaggccttttctgggtatgaatgaatgaatgaacagacagatggacagacaagatcaggagccaaagtggggaagtacgtgtggtcgtgtgggtgtaagaggctctaaagcttggtggggtggtggctttggcaaaggaaaagaagaaccgaaggacttggtaaaagggatgtgggggttgagggaaggaagactcgtaagatggcggccgcactaacagaagtggaaacccggaaggggaagctgtttcagaaggaggaagggtcctttggtccagatgtgtggagtggaagggccgtggctgggcttccaagtgaggagacccagtggccggggcaggtgctagacctagagcccagcaagacaccagggctgcagctggcagcgggccaccactggcctggaagggagaagggctgcttctctgggggaagggagcagagggctgaggctgggcccaagcaagtgactccacatttacaggaggcgggagaatgaagggccagcctacaccagagagtggtcggggcagtgcctgcatcaacagggcagctgagggcttggagaaactctagactgcagaggccaaagagtcggagagggaggcctctggctttggaataaaccgtttgggggggcctttgaagcaggctgcttctatggagaacattaggagccaggccgaggcagatggagtgtggagctcaggtccagggctggctcagggcatttgtcagggaaggggagggaagctgtggggactggtgagtcacttcccctccaggggggcaccgagggcctgtgagtggagtctgtgtctgatggaggggcactctcattactcactggaatttccagccaccggggacagggtggagtagagaggccctggatactcagggagtcacttgtgtggggttcagggattttgggaagaagtgggcgtcagtctcaccatgccgtgtagaggtgtggggaacggggacgaggatatcctggcagacttccaagggcacctcatgtcctcttgagtggaggaaggaacacagcaggggcctgtggggttttaggcccttcttcgtgtcacctgcaggtctgactcatgtgggcagcccatgccatgcacttggagcccgccgggcgggagacagaagaacccgtggtaccaggccctgagctggcatacttgtgccctggggaatgccaggcctggtcgttcccaagccctcgccacagcctcacccgcccgcaccaaatgaggaattgtggctgaaagggcccttcagatgcgccctggctatttataacccacccaggcagggacaggggaaaaccaggggctggaaggagatgggtggggtgggggtgtgcctctgttgaaccctggtggcacagttccctgatcaaaggctgttagccctggggcccctcaagggctcaccccgcaatcccctgctctgtatttcagctctgcaacaggatggagcctctctccagggagggcagcttctctgctgccaatggaattgcatgagccccacctagagcccagagcttctgaagaattctggggggagtggggggctgtggcctgaactcgggccacaggtgtggttcatttagacggcaccatgttgttttaaaatgttaattatttgccatcgttttaaaatcaggagcattcctgttaataagccagattttagcttattttgaacagagatcaggcagccatgagcttgcgtttcctccagcagccatcggctggagtgagtggtggtttcaccctgccctacctggctcgcttcaccggctggcctcacccgcaggcctcacccgcaccctcatgggtgccgtttgcaacctttgctccatcgttgggttgtaaaagagcttttcccagggcctcctctggactcctcctcccatggaaggaggtgtatgtgcatctgggaactagggccagggggaccagaatgtggcctcactccctgcacagttgggggttctgcaaccattggagaagccaggggaagctggctgggagtgggcagggccggagatggtgcctgtcctgggttctgtgtgcactccccttgcaggatggctccctgcggtggggtggctgggggggctgcttggaggaggtgggggtgctggtctcagcagtgcctgtgagtaggtgggaggctgctcagaggaggtgggggtcctggtctctgcagcgcctgtgagtaggggggctggtctgtgagtgggggggctgctcagaggaggtgggggtgctggtgtcagtagcgtccgtgagtggggggactgctcggaggaggggggctgcttggaggagggggatcctggtccctgtgagtgggacgcccaccgctcctgtgcaggacagtggtggcgccgcgctcctgcctgggggcaggtcaggcctgtctgttgcaaagcctgactcctccagcggcggcgggacgcggctgtggcttctgggcgggccggggcctcccctccggaagggggctccggcgcatggggactccggggtggctctgggggtcgcccctgctcgccgggctcctggctcggccgcgcgcggggaatgaagatgcgtctgggaagcggcctccccgctccaccccaccccggcccggccgcggcctcctcgctcctcctccgccgcagaagcctccgccagccgcggccccgcaaccccagaggacgggcggctccacctcgcgacgcgcgtttcctgtgtgttcggagcgagcgcgagcccgagccccggagcccgggaagggcgggccctgcggggccgggcgggacacggaggagggcgctgggctgctgtgcggcgggttcgcctccgccacgggccgggcacggcgtcaggggctgcccgggccttgctccccctttcgccgggcgaggacgcgcgaggcggcggcggcggcggcggagcgggctggactaggtccgggatgcagtcccgggtcgggagccccaggccgggcgcgcgggtgtagacctgccccccctcccgcccgcctcctccctcctccctcctcccgccgccgctgcgtggaccccgcttcctgtctgccctccgcgggctccggctgccatggaggaggaagaggaggcgataggcttgctggacaaggttctggaggacgaagatgtgtttctcctggaggagtgcgagctgggaaccccgaccagccccggctcagggtcccccttcctggtggctgtgaaggtgggagcgtgacacgccctgggcgctggggggggccgggccggcgctgccgaaggtgcgcgggagaaatggctgatgcgggcgcagagcgcgcggccgggtggaagccctcggcggagggtcccggccccggcagctgttcccgggggagaggggcgggcctgcctccccgaccggtgtcctcggggcagtggtggccgccccctccaggccagcccagctcagggctccggcggctgtgccaggagtcacctggcgcgcctgtcagcccgagcctcgccgcctccctggagcgggtgggcaggaatcccccgtttccacggcaaccgcaagagaggggccaccctcttcccagccaggagacagggacttggtgtctccgagctgaggcaagagggtgtttgcaaagggcaagagccagaggtcactgagcttccttgaaggaaaagcactgggtcagctgaaggggggagggaacagctggcttggaggctgcagccaggtgggcaggtgcccttcccgaggcgggacaggcagggagcatctgctgggccctggcccacccgctctggggctgacggcgttctctgcagcagtgacccgtcctgtaggagaggttggctcccggtggaactggagggcagtggtggccagaatcccttgaggagcggggcggccccggaaccacgccggctctgtgagtctggcccggcacaccacagcggtcttcctttttctctcctggacacacctctcagagcttccacctcagccttttgctcagctgctctctggttctgtgtcgagaagggaggcccagtgaggatgcgtttcggggagtttgcagactgctaggcgaggctgcctaaccgagtgcccatcggcggggcctagaaggcatgtgcagccagcattgctggggacgggaggctgtccctgaacctctctgggcctccctgcccctcacagaagatggggatcacagtcctgccccacccactctacagtgtggctctgaggaggagccaatggaggtaaaaatagatgcagaaccacgggagatggctgatgtgtgagtatgggtggagcggtggctgcaggcctgggtggggagtggagctgtagggaggctggcagtggctggcaccccaccctgtcttctctgatctggtgctggcgtagggccgtgggggtaagtcacgtctccccgtgggctcagggaggcctctgcacttagggtctgaccagcctccccactaggaacagggtgggaaagtctgctcctgagccaggagtcaggctgggagtagcaatgctgggatgggaggtgtgtggccctcatgggcctcctctgggaagcccccagcacagatgtgggcccactcagaggctgcctcctggacctccccttctgctggaccccggcgtatgcctcagctaagcccgtatttcattctgctcagatgctcagaactctagacatttgcctccgcaattatatcccattctcctggaggaccaggaccatgtcatattcattgctgaacactgcacagtgcttggtgtggggctggtgcctgtgagagtctgcacaatgtgtgaggcccgctggggcccacgaagggtgcaccaggttcccagcctcgctccatctcagaggtgtcctgctgtgtacggcggtggcccacggatgccaagagagcctgagcacgtgtcacacctgaaaacgctgctcctcctgggtccccgtgagcaccgggatggtgtcttcccctctactttgctgccagcatgggggaaggagacctttctcgaatgccggggagttccaggctccctgctccatcctgaacacctctagaattcctccctcctctaccggcattggcctcagagggagaagacaagcaggtggccacagagcggtgggaagaaagctcctggattcattcaacaaacactctcaggttaggtgctcttcagagcaccctgcctggcactgtagagatgacaagaggaacaaggcgtgatcttccctcacaaggcgttcagagcaaggggcaggtacagggagtaggaatagagtacggaagtaggcagggtgggccagatgcggtggcacacgcctgtattcccagcactttgggaggctgaggtgggcggatcacctgaggtcaggagttcgagatcagcctgaccaatatagtgaaaccacatctctactaaaaatacaaaaattagccgggcgtagtggtgggcgtctgtaatcccagctactcaggaggctgaggcaggagaatcgcttgaacctgggaggcagaggttgcagcgagccaagatcatgccactgcattccagcctgggcgacagggtgagactcagtctcaaaaaaaaaaaaaaaaaaaagactgtgagaagagtactgataaaagggcaccaaattcaggggagaagggaccacttctagtggagttggggatggcctggatgcgtgcatgtgtgtgtgtgtgcaggccaagggtcatttctggatgatacactcctgtcctgggctgcagaggttcttggcacacccttccctggcagctagtaggaatccaaggcaattctctttgctattactttactttaggggtacttaccttaagcagcagttgcgttgtgagcatgtgcccaagtgccaggcccataaatcaatcctgtttccagtgtcatttccaagacgcttcatcttcctggggggcagaggtaaagttggctgcagttttctccaaagctatagctggagtttgctgcatatctcagcccagacttacctttgaagagttattgatctgtaaaactggtaatgcaaataaaatactgatagcagcgtcatgttgcatttgtaaaatggcttacacttgccaaaaatgtttcatgccattctatttaaagataggtagggttgtgacgggggcgttgtagaaggtgctattttaaggaacttatttgtcaggaataaaaacccttttgtaatgcagattaaccctttaggtatcattctgtgccatttttttttttcttttgagacagagtctcactctgtcacccaggctggagtgcgatggcacaatcatggctctctgtggcctccacctcccagactcaatcagtcctcccacctcagcctccccctcactacaggcacatgccaccacgttgggctaatttttatatttttgtagagacagggtttcaccatgttgcccatgctagtctgtaactcctgggctcaagcaatctgcccctcttggcctcccaaagtgctgggattacaggagtgagccactgagcccagcccaattctgtgccagtttttaatggatcatctgaaacatctctatttctgtttcacctgcccaggtctcttgtgcctgcacatcatgcctgtatcccccatttggatgtttttctaagtgcgggccccacgtggtgatttgagaaatgatcggtggcacctcgatctatattttgcattttaatggttaagtatatattttaatatatattagaaaaaatatgacctgtacatttttcttacgatttcaaatacgtgtagggtaagactgctttttacaagtcagttcttgggcgcagtggctcatgcctgtaatcccagcactttgggagactgggcgcggtggatcatgaggtcaggagttcaagaccagcctggccaacatggtgaaaccctgtctctactaaaaacacaaaaagtatctgggcgtggtggcgtgcacctgtaatcccaactactcaggaggctgaagcaggagaatcacttgaacccgggagatggaggttgcagtgagccaagatcctgccactgcactccagcctgggtgacacagtgagactctgtctcaaaaaaaaaaaaaaaaaaaaaaagttactgtaaagaacaatattgagtaaagaatagtgcaggtggtggtatgtgagtatggcaaaattttaagggtgggatatgaacaaccaaagtttcaaaacattgcctgtgccctatggtgcctgcctaagacctcagacagcaatagggagcccagaatacggggatccacccttcaggagagaggggccactggaatttggtctttgtcccccagcagttgacccgtcttctctgttctaaattctgccaaggaagcagctgaaagagacttcctcagcgcctagcgctgggagaggagagggtctctcgatgcctctacactgcctcagctgtcctgagactgagatgggccagttgtcctgaggttgatgcttggtgtgggtataagccccaggcacggccacccccacccccaggcccagtggcatctactctgagcagatcctgctgggtactcctggcagccagctgtggcccgtgaactgacttctaccgtctgtgaagcctcagaccctcgctgcatgccctatagccttgagtcgcagccagagagccagccctgcttgttgtcttggaggccagtgctactggagagattgtgtctttgcttggcctggaaccagatgtttggaggctttatttagcctctcaactctgtggaggaccaggcctgagctggccacgccttatctctagacattgttcctaccagagtgacctgacgtctttggtttggcggcttcaagctgccacactgtcagcctagcagattgtgcaggatgctgaggataaacgaacccaccaggactgcatttcacaagttctggctgggaggaagtgaggacaggcagcttcccggtgctggagacaggtaggcagcgtggcagaggctgtgggacctggaactctttagagaactcgctccggagcattctaggcacgtgggcacctctccttcaccttcgtattcccagtgcctggctcccggtgggaatgggtgagtgagtggtgagcctggtttttgatgagacaagagacgccctgcaaagactgaagaaacaatgtgaatttcctcatggctctaaactgggaattgtggagtctgaggaaagctggaaaagatgggagatggaacaggccttcctttggtggtgactgagcaacgggtctcctgttagccaagtgcaccgaggctaatttcccatccgtacgctctccaacgcctttgctccaatctcagccaaaactgcagcgtgaacggggcccagagcaggactcttggggctgactgttgcctcttgagggagggtcttcctgagttgtcttcccatcagaaccagcctttcaagagtggactatgaatggaagtcttgaggggaggatcttgcagaaatgggcgattacagggcttccagggtctatgctcgtgccaggggggatgaagcttgtttgtggctggggctgcaaatccctttcttccccccatcctagtccaaccagctctacagttacagctcacggtgtggcatttgctaaaccctcaggcaaaaccttggttggcagggaacaggagggagtgctagcccccagcacaggggatgagttcccatttgtcaaggctgggaagcagcaggaagacccctgagggtctgacctggaggggctggagctgggggctgttccaggctctgatcttgtcccccggggctacgtgtgctggaggctgtgcaggcctctggcagtcccgactctcggtgcctcaggaagatgataacacctgccaggttttgagactccggtgaattgaaccacaaagatagctaagctcagttcctggaatttgtgaagccgccaataagtaactattgcccttgcctgaagcgtggggtctgtcttgcttttctaatgctgctgaaacaaatcgccacaaacttaagggcttaaaaccacacaaatttattctcttatacagaaatctaaaaaggatctcggcccggctccatggctcacacctgtaatcccagcactttgggaggccgaggcgggcgcatcacctgaggtcaggagtttgagacgagcctggccaacatggtgaaaccccatctctactaaaaatacaaaaattagtgggtgtgatggtggacgcctgtaatcccaggtactcgggaggctgaggcaggagaatcgcttgaacctgggaggcagaggttgcagtgagctgagatcatgccattgcactccagccctgggcgacagagggagactttgtctcaataagtaaatacataaataaatagattaattaaaataaaaaggatctccagggctgcattgcttctggaagctctagggcaagcttttccagcctgcggccatacggcccaggactgctttgaatgtggcccgacacaaatttgtaaactcttaaaacattatatatttttcttttagttcatctgctgtcgttagtgttattgtattttatgtgtggcccaagacagtcgtcttcttccagtgtggctcaggggagccaaaagatcggaagcccctgctctaggggagtgagttcattttattgccatttccagcttccaaaggctctctgcattccttagctcgtggccccatcctctgtcttcaaacctaccagtgtagcatcttccaagcagtccctcaccactaccctgtctccccggccctctcactccccttctgtggccacgatgcctcagggaaagatggcattttaggcagcaggtaaagaacgaaccgaaagctagagacctttgaagatgaggaggctggttctcctgcgtgtgggggagactgagcgatgtcctggctgtgggaaagactggaagggtagggacgggcatccgggccactgcaggtggctcataaaggatatggtgggccccatgtcccagtctagggccgaatctttacttgttttttaaatgtctttccggcagggtgcggtggctcacacctgtaatcccagcactttgggaggccaaggcgggcggatcacgaggtcaggagatcgagaccatcctggctaacacggtgaaatcccggctctactaaaaatacaaaaagttagctgggcgtggtggcgggagcctgtagtcccagctactcgggaggctgaggcaggagaatggcgtgaacccgggaggcggagcttgcagtgagccgagatcgcgccactgcactctagcctgggcgacagagcgagactccgtctctaaaaaaaaaaaaaaaagaaaaaataaatgtctttcccactagagtctaagccacttgagaacaggggccactgtctgtttcccatggtatctatagggcctggtggacattcagtaaatatttattgaatgaataaataaatggacacatagcccagtggaatccccaagtactcgcgttttgcggtattcatactcggtccttggcaagcatcgggcaaggtggcactcttaggagttgaatccagctctggtgtgtgggacaggcaggaggagaggaagagagggaggaaaagtcggttcgagaacccaggtggaaaatagattgagggaagcaaaacgagatgttacaggaggaatatgggtgattgtcttttccttttatatttctgcatgttttgtatattttttataataatatctgacttttatcccctatgaaagtgtcgcttaaaataaaaggaaaggggaaaggggggccgggcgcggtggctcacgcctgtaatcccagcactttgggaggctgaggcggacggatcacctgaggtcaggagttctataccagcctggccaacatggtgaaaccccatctctactaaaaatacaaaaaaaattagtctggcataatggctgggcatggtggctcacacctgtaatcccagcactttgggaggctgaggtgggtggatcacctgaggtcaggagttctatatcagcctggccaacatggtgaaaccccatctctactaaaaatacaaaaattatctgggcatggtggcaggtgcctgtaatcccagctactcgggaggctgaggcaggggaatcactggaacccgggaggcggaggttgcagtgagccgagattgtgccactttacttcagcctaggtgacagagcgagacttcgtctcaaaaaaaaaataaaggtcgggggggaagggcagggaagcagaccgtccacgcagggttttggcctccttgctcatgagctgttggctgtgctttgcgtttgtgcaggtggaagcagggaaaggcctggagatgaggaagctggttctctcggggttcttggccagcgaagagatctacattaaccagctggaagccctgttgctggtgagtacagtccctgctctggggccttccggtccccccgcccgtgttgggtgatgtcatgctctgaagctgcttttggagttggagaggaaaggggaccgtacccgtccctccctgtggacagagtctgcagctggtctgcttctggctgggcatcgggcagcccgggtcattgccagaaagggcctgtgcctctcagctccagctctcaaaaggcaggagaagcacacccggcttagagatggcaaacacacctgtcacccacgaccctggcatagggcatcgtgaacccatcatggtgctctgcctgcctgggcgggggccgagcgccttctccacgctgtgctctgggcagtcattcccaatcaatccagttaagaagtctctgccgtcttgtgtccaagtccttctacctccctgggtgagggaaccgttagtgccatcctgaggccccgtgtcaggaaatatgaggtgggaggctgtgttctttttttttttttttttttttttaagacggagctttgctcttgtcacccaggctggagtgcagtggtgcgatctcggctcactgcaacctctgcctcccgggttcaagtgattctcctgcctcagcctcccgagtggctggaattgcacgtgcacgccaccagtcctggctaatttttgtatttagtagagacaggattttatcatgttggccaggctggtttccaactcctgacctcaggtgatctgcccgccttggcctcccaaagtgctgggattacaggcatgagccactgcgcccggcctgtctgtgttcttttgagaagcggcacagctctgaggcatcaggccaagctcagccctcggtaacatgcctcagttcccctcccagatggaggcatcgttgtgagagtctgattgggaggggaatatgaaaatgttttcggaagataaaagtactacacagatgtgaggtggttttgccttggaagaaagtgctccttagatgtgtctggatgttatgcagagtgatcgtggcgtgtcaatctttcttttgggtattttgcagcctgagacataaggtaattgtcagaaaagggagacgcagaagtgtggatctgtggaagctcattcttaacaagaattctaagatgcacatttaagtacttgccatgacgtgaggtgttgtcacacgtcaaccctgagatgctgtcagtgtcccaggggacttgacatttatgttacccaggaatgactgtgtaaatgtgcaggtgcaggccgggcgccgtggctcagtgcctgtaatcccagcactttgggagccccaggtgggcagatcacttgaggacaggagttcgagaccagcctggccaatgtggtgaaaccttgtctctgctagaaatgcaaaaaaaagccaggcgtggtggtgcatacctgtaatcccagttactcaggaggctgaggcatgagaattgcttgaatctgggggcgaaggtcgtagtgagctgagagtgcgccactgtactccagactggacgacggaagtgaaattcctcaaaaaaaaaggctgggtgcagtggctgacacctgtaatcccagcactttgggaggccgaggtgggtggatcacctgaggtcaggagttcgagaccagcctggccaacatggtgaagccccatctctactaaaaatacaaaaaattagctgggcgtggtggcgggcccctgtaatcccagctactcaggaggctgaggcaggagaatcgcttgaacccgggaggtggaggttgcagtgagccgagtttgcaccattgcactccagccggggcaacaagagtgaaactctgaatgtgcagctgttttgccacacgccaggctgagtacgtcccatctctccaggagtttatctgtgtgtacggagctgttttccaagtgaggggcagtgtggcaggtagctgagggtcctggtctggggccagagctagggcaagacttggccctgccattaagagcaggcgtattgcactgtttctcaaactgtgcctctcagcccatcagtgctttgggttgtgaaatcagtacagtgggttgtgaaaccagtacagtgggttgaaccagcatttttaaaccaatgaaaaaatgtcagcatgcatcatacacgggaaagataagtgagggaactttcggtttgttgtctgtctgtgtgcctgtatatatatgtaattgccgggcccatggtgtcttacacctgttgtgggtttgaaaactgctggctttggccgggcgccgtgtctcaagcctgtaatcccagcactttgggaggctgaggtgggcggatcacaaggtcaggagatccagaccatccttggccaacacggtgaaaccccgtctctactaaaaaagtacaaaaaaaattagccgggcgtggtggcgagcacctgtagtcccagccactcgggaggctgaggcaggagaatggcgtcaacctgggaggcggagcttgcagtgagcagagattgcgccactgcactccagcctgggcgacacagtgagactccatcacaaaaaaaaaaaaaaagaaaagaaaactgctggctttgggcaagccctacataaattccttgagcctccatttctggatctgaagatgagagggatgccattctttctctctctttccatggggttgagaagatcgggagatgctttcgggacctcatacagcgttgagttacttaagacactcaactgttagtggaagaaaggaggacaggcaaagagacaacccgtcagacattcgtgaaacacgtcttccaaaccgtgaattgctgtccaaaaaggaacatagttgtcattactaacagggtgtgtatttgaaaggagttcagacagaggatctagactgcctggccgtactggctccaggctttcagcaggtgaatgagctatcgtgcctcagtttttccatctgcaaactgggtatacaaatagtatgcttttcatggggtcgttgtgaggattaaaggaatttatacacagagttctttttttttttttttttttgagacggagtcttgctctgttgcccaggctggagtgcagtggcacaatctcggctcattataacctccgcctcctgggttcaagccattctcctgtgtcagcttcccaagtagctgagattacaggcacccaccaccacgcccagctaatttttgtatttttagtagagatgagatttcaccatgttggccaggctggtcttgaactcctgacctcaagtgatccgcccgcctcggcctcccaaagtgctgggattacagatgtgagccactgtgtccggcacataaagctcttagaacacagcctgagtgttcgttgacactgttaatttctctattgctgggagaggagacaggttagggcttcgtggtttctgccacaacacacccgttccctgaaggagggagtggcgcctgtccccatcagacacggagcccttagatcccacctgccacccacgagcctcttcctctgggccaagaccaagagcccctccctgctctgcctttctaacagctcatgccccaaaggcagaatctgtggggcaggggcccccttcctgatatgcctggcgcaggttccccccttccccagctgtctcctcccggggcaggttccccccttccccggctctctcctccccgggcaggttccccccttccccagctctctcccggggcaggtttccccccttccccagctgtctcctcctggggcaggttcccccattccccagctctctcctggggcaggtttccccccttccccagctctctcctcccggggcaggttcccccacttcccccagctctctccacccggggcaggttccccccttccccagctctctcctcccggggcaggttcccccccttccccagctctctcctcccggggcgggttccccaccttcccccagctctctcctcctgggcccctgcttggctctttcttgagcagagaccagagggagcaaaggaagaactcgctgggaggccaggtctgtggtaggagggctcaggaagaggagtaggaccctccacagccacagcctcagaagaaaacctcagagtgaaagaatcacacccttcctcctctcctccctgagctgggaacccctgcaccctccccacccctcagctaggaggaagctaaaccttctgctcttcggggtggcctcgcaaaggtgccagcttgaaggagaagaaattcgttccctccatgctcgctttcccactcctgaccccattcccaccgctctgccccagcctgtttgctttcatctgaacacttcctgatatgcaaagggctgggtgtgtgtacctaaaaccatgtgcacacacggggcagacgagcctccacacagaagcctccgtcctggcctctggggtgcttgtgggggtcatcttctggggccctcctgcttcctggtgggctctgattacaggaaaagcctgggagcctgggccgaagtagggggtgaaggaaaaaagatgaagccaactgcattgaaattctggatctccttgacactgggaactgagcttgggaactgtgtcttgctacgctggggccacagggtgaggccactccccagagcccctcccaccgctggccacgactggccctcctggggtggactcctggccacgctgcatcgcaggctctttatctataaaacaggtgaatgaggccttcctccctgggctccagtgacgagtgactcgggtggcatggcagcaagcatgccaggccttctggggcaggaggtggaggaagtgggtacatttctttcccttatttcgaaaggccggtcgctgggggacagagctgacaaacggctatgtgaagtcccactggcaagtgagaaccggcccaggcccgtcttcctgagaagcagctggtatgggagccagggttgaagtcactcacgggtcctctccgagaactcgagtggtgaaatggagagccggggcctgcccttgtccctgcagcaggactggggaggagggggtgcctgagtggtgtgctagcgctttggcagaatggctgtgccgtgccgaagctcagtgtgggtcaccttgcctttcagtccaccctcctgcccctgagcccatacgcaggacttcaccagagacaaataacggcctcgagggtcctggccagccaagggcacacacccagccctgtcccctccccgcgagtgaaatcaggagtaacagccaaggtccccatcgtgtcatgagaaccatctgatgccccaagcgcaggccccgtccttgtgactggctgtgggtgagcgtccatttcttccccttttgcagacggggtgggaagttgaggaggaagcataaccattgtgttttgtcttcgtgtgggtggcagatgagcgcgtcgcggcttctgagaaatcccgtctccttggccttcctgggactgctgaccttcctgcttcccttatttccccctcagtggggactgcgccaaggcggggacaagaattcttgggtatggggattctgtggcgactctgcgggctcctccgtggggtcctgcgttgaggtgaaaaggataaactcttacgacgatgtcaatcctgaagctagttccatgtccctcatggagggtggggagtccccaaagctttcagctcacccacctgggcttggggggacactcttcccttgctcctgcctcccggtgccttctgtttccctgtctggcatgcctctctacgcccccactcctccacctgctcagctctccaaggacctggtatgtgtgcctcctccatgcagccctccaggctactccagcacaaccttggaaccatgtggttggtgcttacagtcagtcgcatcgtccatagtcatttcatctgtgttggcccattttgcccaactggattataaaggtctcagccaggcatggtggctcaacacctgtcatcccagcacttcaagaggccgaggcacgtggatcacttgaagtcaggagtttgagaccagcctgaccaatatggtgaaaccccatatctacaaaaactacaaaaactagctgggcggggtggtggacacctgtaattccagctactcaggaggctgaggcaggagaatcgcttgaacctgggaggcggaggttgcagtgagccgagattgcactattgcactccagcctgggtgacagagtgagactctgtctcaaaaaaaaaaaaaaaaaattgcagtctgggaccatgatcgtgtacgcactgacgggaatgccagtaggtagcgcatggctgtattatcccagtttcacacatgaggctgctggtgacacgaagcccagggatgctgagtgatgtgcgcacagcagagctgcgactcaagcccaccctgcctggcctgcaccaggtggaaccccatgcgcttgcctagcaaggaccagacaccgaggggccgttggttctaggacggcgagggtcagaaggagaggcctgaccggacgcagaggggccgttggttctaggacggtgagggtcagaaggaggggcctgaccggacaccgaggggccattgattctagcacagcgagggtcagaaggagagtcctgactggacactgaggggccgttgtttctagcgcggcgagggtcagaaggagggtcctgctttgtcctgcatggattgttggatctgggctttttagagctcggaggatgaaggagccagaaggcagagcaccatctgggtgtctgagtagatgagacgacttcttccagtgaacatgggttctgtctccatcagagtgaggcgatatatctgagtagatgagacttcatcagaatgaggtgatgtgaggctggagtgaggctgggctgggagtttgccgtggttggctggagctggtggtcgtcgttcagagggagctggcgctggctttggtgttcccttcagtgcagcattttcagcagtggagtcacccattctctgctagaatgcttctcttgtcggaaagctcactacttaatcctatgggggacagctctagtgagcccgaatctgaccccataacttttccccactgttcctgggtctgcagagcaacgtagattaagtctaagcctcgtttttgtttttggagacagagtctggctctgtcacccaggctggagtgcagtggcgcaatcttggctcactgcaacctctgcctcctgagttcaagagattctcctgcctcagcctcctgagtagctgggattacaggtgtgcaccaccacgcccagctaatttttgtagttttagtagagacggggtttcaccatgttggtcagacttgtctcgaactcctggcctcaggtgatctacctgcctcggcctcccaaagtgctaggatgacaggtgtgagccaccgtgaccagccaagtctaagcctctttccacgtggccttcaggtaggtgaagaacatcaacagaatccgacatggctggccgggcgcggtggctcacgcccgtaatcccagcactttgggaggccgaggtgggtggatcacgaggtcaggagatcaagaccatcctggctaacacagtgaaaccccgtctctactaaaaatacaaaaaaaattagccaggcgtggtggcgggcgcctgtagtccctgttacttgggaggctgaggcaggagaatggcgtgaacccgggaggcggagccgagatcgcaccactgcactccagcctgggcgacagagcgagactccgtctccaaaaaaaaaagaattcgacgtggctgctctccctctggccaccctgcccttccctgccacaccttccctgtatggcaggttatcaggccctgtgtcctgcagggcctttgcagtacagcctggtcatctttggtttttttttttctgattattcatattcattcattgtaggtgatttataaaatgcagagaaccacactgaggaaatgcctgcacgtcccgttatcccacggtcccactgctaggctggaaggtgatggcatcagctcccggccagtgctgggggttggtctgtgttatctgccacctcaccgtctacactggcaggccctggagcatcttggtatagacaggcaggcattgagaaagagtctgagactggagacccctgccatgcgcagtgggaaggaccatcacggtcgcttagcaatgtctgccacgggggtgggctgcagtgggggacacgtgaacgcccatgcctctccctgtgccaagtgacgggaacttggaacatcagtgaggccaagactggtcttgagtaacttcgggtccctaccttctgagtcctagaaccacattctgtttcttggaaggaaacagctataggcttgagttccctgtcaaccctcccttccactgaagtgtgacaaggagcttatgactcggggcacaggctatcgtggaagaaagacgcggatcctgttaacccagtacaggctgctgctgagctcagctgcgtggtaggggagtgagcccaggcaccacccctcgggcctggcacagctgccaggccaggttcctgctgtcgagtgtgcggcttgttggggcctgtggcagtggctccttgatacaaagctcgtttcagtgccctgcctttggcagccttgtctgggcaggacttgggcagcgggaagggctaacgatcggccccggggcctgccgacactctggtttgtttacccccgacctctgctctttcttcctctgtttctcccagcccatgaaacccctgaaggccaccgccaccacctcccagcccgtgctcaccatccagca

SEQ ID NO: 15345 - DNA, 39784 bp, Homo sapiens
tccgggacacagcggagcccaagtgggatgaggtgagtggcaggggctggcatctctgtggggaccccaccaccccgtgctcgtggcttgtctgctggggacggccagcccattggttggaccagctatgtctgcacccccctttctgctccctgctcctctggcttctgatcgcggtgtgtgtctgggtgtcagaccctgtggtgtcagctcaggcccccagactccaggggtgatgggaggcctctgggagctccagaaaatctgacgtgtccttcgtgggccgtgcttactccctcctccttgcaaagctgaggcacgcacctgccggaaagccaggcctcccagcttcggaggttcagggccctttgtcccatctttccccaggagtttgagatcgagctggagggctcccagtccctgaggatcctgtgctatgagaagtgctatgacaagaccaaggtcaacaaggacaacaatgagatcgtggacaagatcatgggcaaaggacagatccaggtgaggccagggcgccggggcgaggctgagggagcctccaggaggtggttccagttgaaaaggaattctggtcaaggagcctgctctttcgtgattttggttccaagctggttggaggaaagttcccaggaggtggttctcccctccctgctagaggtggctgcctgttgtggccccggaagcccaggcgtgtgcgtggctcctcaggtgggtcatctgcgcttctgcaagatggaaacaaccagctttgttttcacacgccagctttagtctatgggtggttgtttcccggaacgccatgttgagaaggactcagaggctgcgtcggtgaacgggagggaggaatgctgtgtgtgaggagccgtgtctgccattgacgggggaccggagttaggcacacggaccaggcgtttgctcttctgcccgaaagacttagggtcctgctggttggcttggggggaggggggtctctgacttgttgttagggtggccggaccttactcagctgcgttgggagtctgtggcttcgggtggggactctgggtgttagtagaggctgcacctcgggttaagggtatttatgcttctgggtgcggtggctcacgcctgtaatcccagcaccttgggaggccgaggtgggtggatcacgaggtcaggagttcgagaccagcctggccaacatggcgaaaccccatctctactaaaaatacaaaaattagcaggtcgtggtggcgggcgcctgtaatcccagctactcagtaggctgaggcaggagaatcgcttgaacccaggaggtagaggttgcagtgagctgagatcgcgcctgggtgatggagtcagaccgtgtctccaaaaaaataaaaataaataaaaacagcatttatgcctcaactgtgcttttggctccctataaacatatatagggaaaaggcctctgtgtgtgcagcctgtgtctctgaaacattctgccaattttgaagatggctgctattcaccaacctattaagagaagtaggcttgggagcgggaaaaggcgtgacgtggtggagccgctcacactcccgtctggtacctcgtgtggcctcgtgctgtgccgcaagtggtctggtttgggggtagattctgtgaccatgaaatgaagggagacggtaactgacccgtactgaggttgagcctcgggcgttgggcgtgctgagcttcttgacagtggccgcagacgtgatccaggcacagctgggcgccgagcttcttgaccgtggccccggacgtgatccaggcgcagctgggcgccgagcttcttgaccgtggccccggacgtgatccaggcgcagctgggcgccgagcttcttgaccgtggccccggaggtgatccaggcggcagctgggcgccgagcttcttgaccgtggccccggacgtgatccaggcgcagctgggcgccgagcttcttgaccgtggccccggacgtgatccaggcgcagctgggcgccgagcttcttgaccgtggcccaagaggtgatccaggcgcaggctgcgatggctccgtctacaacagggagctgaacgatgctttttagcaggaagcatttgttctctgatgcattgtcatggccaccgagtttggtatctggctcttacctgcaggtccttggtagcattgcccctggggagctgtgtgggtctcccactcgctgccccatctcaggctccagtgtttgaaccaggggccccacgtggaggggcctggcctctgccgcatacgccccgtgttcctaaacacgtctctttccgatgctgtggggtctgcaccctgcttctcagtactcgtcactagggagacagggctgccaggcaactgccagccagtccttcgtgatttaggaaatgggctctagagattcagtccctgggacctgctctctgtggggataaggggagggagccccatctccctgtccctgggctgggctagagggacaggcacggaagggttctgggctggcctgtgcagccccaggagacgcccaggcaagagacgagtggtcgccacgccacactccctgggccactggtggctgtggaatagaagagttacaaggatgtgccgggcagccagccccgtgggcacggtgggccccagcccctcgagaactcagctcccaaggcccgagggcacattcccccacctggacttcagccccattgcttccctccttctcactcagctgcacaagccccgggggaaacacaccatcagtcactgcaagcctcttggagacaggagcagatggaggcagtgggggagggaggaagccaggttatgtttggcaaagcagaaggcagagtctggtaaggaaaatgtttctgtgtttaagcttcgaggaatgttaaatgcctgggagttgatattaaaagaaacataaaccttcctgctgccagctgacctgggcctgtgagcggacagttcagagccagagtcccctgcaggcctttgaagtcccccagcactcagcatgccaaggcccggccctggccctccgctgcagaaccatctcaccagcctgcctttggtgggggaggcatgccccaggggcgggctgtggcttagaaagtctcgccccgtgactgccctcagagccaccgtggatggccaggctgggtgacgagtccacacggagctgttcccacgaacccgggccccacggagccacggaacggtctgtccccacagcttgtctctgccttcactccggccacacatctaaggaagggagctggcactagcctctggaatgcagtctttctgcccgccagcaggcgctgaggacatagtcggaggtggctttgagatagggcccagccctcggggatattcagggggcctgtaggaaaggcaggaggaggagggcagtctctgaggcccccacttctctctaagccccctcccagcagcccatccagagaaagcaaggggccctacggcctaagcgcaggcatttgctgctgtgatgaggcccccactctgggtcgcctgatggggcagtggggcaggagtctcagcggcggggtggggtgggggaagcatttagtgacagacagacggcagcatgcgtcaccaatgtgtgtccagcacttgtgctcctggaggccgcttcccaaatgccatctcctcgtgtgatccttgtcgtgatcctccagggagaatgacagtccctcctccccatcttacagatgaggacactggggtactgaggttaagtaccttggccaaggcatctctgcgtatggtatgtgggaaaggccatgttccctcctctgtgccatgtccccacgtctcaggcctttgtcaacgaatcccccagcccggacagagggccgtggcatggctaatggcctggagaagcagctgaggtgctgctttatggcataaggtgagcgtcctttgtcttggagtcctctgggcaggggacacttgtgcctggtgcccctgggaggaaggagaggagcacgtgcgggaaagagcaggaggccgaggtgggctgatcacgaggtcaggagttcgagaccagcctggccaacatggcaaaacccctttcctactaaaaatacaaaaattagccaggcgtggtggcacgcgcccataatcccagcactttgggaggccgaggcgggcggattacaaggtcgggagttcaagacccgcctggccaacatggcgaaaccctgtttctactaaaaatacaagaattagctgggtgtggggcccacgcctgtaatcccagcactttgggaggccgaggcgggcggattaggaggtcgggagtttgagactcgcctggccaacatggcgaaaccccgtctctactagaaatataaaaattagccaggggtggtcgtgcgtgcctgtaatcccagcacttcgggaggccagggcggggggatcacctgaggtcaggagttcgaaaccagcctggtcaacgtggtgaaaccctgtgtctactaaaaaaacaaaaattagccaggcgtgatggcgggcacctgtaatcccagctacttgggaggctgagggaggagaatcacttgaacctgggaggtggaggttgtagtgagctgagattgctccattgcactccagcctggacaagacagaatgagattctgtctggggaaaaaaaagaaaagaaaacagcaggaggggtacttagcatgcgtctgtgaggtccccagcccaggagggggtcctggcctccagggacccactgtcagattggaaagacgagtatattggtccatgttctccagtgagaagaatgctagatgtcagccacaatagccgtacacacataagcgagcccaggacgagcccagcacggtgctaaatgcttccatctgctgtctcaggagatcttcccaggaccctgtgggagaggaatatcatcacagctagaaagatgaggaagctggggctaaggagcccggacaaggccatgtgcccaggagtgggccagggcgggcagctggctgcagagcccatttctagatgtcctgctgcctcctgctataagaagacggaagattgtcctgctgtaagaagacggaagattgtcctgctgtaagaagacggaagattgtcctgctgtaagaagacggaagattgtcctgctgtaagaagacggaagattgtcctgctgtaagaagatggaagattgtcctgctataagaagatggaagattgtcccgcaggaattcagaggcagaaaggtcaccatgggctggaattagggaggcttcaaggaggaggtggaacgagagcgatttggaagccctgggttttttaattccaaaagcaatgtttgtatgagaaagaaaattgcagtagaagcaaagagacttgaaacctaatcagaaaccatccttcctccggctcctccgaagcagccagtttattctgtgccttttcccttcttgaggtatacacatttttatgtagatttaatcagggcctgttttgtctgtttttctgttttcatggattattataaacctccttttctctagagctgtatggagtcttcttaagcacctttttggatactttgttaaaagtactttatattctttgtagaaatcttggtatagagcggccagcgcaattgctatgctaaggctctgtgttattccagcaaggtgcgcaggctccgcttccgcagaagggagtagggtgggagttctggaggacagacccgcctggcagggaggcacgaatgtgaagggagggtcccaggaaagtcaggagcctcagcaggggtggcggggagctgcaagcaaggccagtagaaggaatgaataaaaggaggggattcctgggggtttggccggaagaggtattttttttttttttgagatggggtcttgctgtgctgcccaggctggagtgcaatggcgcaatcttggctcactgcaacctctgcctcccaggttcacgccattctcctgtcccagcctcccgagtagctgggattacaggcgcccaccaccatgcccagctgatttttattagtagtagtagagacagggtttcaccatgttgaccaggctggtctcaaactcctgagctcaggtgatctgtccacctcagcctcccaaagtgctgggattacaggcctgagccacggcacccggcctggaataaatcttagagggcgtttaatccaatcctgttttccggagagaaggaaatggacaccagcaagggtgagcgaggcagccgcggtcacagagcttgttagtgggtgaacaagggccccagactcagggaccccatccaggtccgcttagctgggagccccccctccaccggctcttgcccctgcccccggcgtagtctgccctggctcctggtcccaggggactccactgtgtttatcctactctatttccagccttgccgctccagctgcaacctacccgctagctgattagcatattcccagggtccggcccttcttggcgggctgggcctgaggagagcgctttcccttggggccccacagctcagtttctgccagcgtccccagactggagaagggcctgagaccaagaagctacttaaacctgaggggccctctgcaccccctgcccgccccccggccctgcgtcattccctcgctcaccgcaggctggggacagcccccaccccacagtccacctctgctccctgtgcctgggaggcagctccacttccccacgtgcctgccagggcagcccctccctgggcacagcagcgctgaagaccctgtggtgggaggggcaggttccaggccaggaagggagtgtgagccaccgcgtccggcctttattctttttaaagaaaaaatagtggtagaagccaggcatagtagctcacgtggtgtagctgtggactacttgggaggctaaggaggctagagtgagctaaggattgcgctactgtactccagcctgggtgacagagcaagagtctatctccactgaaaaaaataaaaaataaaagattgtagtgaaatatacataacataaagttaccattttaataaattttaggggccgggcgcggtggctcacgcctgtaatcccagcactttgggaggccgaggtagatggatcacctgaggtcaggagttcaagaccagcctggccaacatggtgagaccccatctctacaaagattaaaaaaaattagccgggcgtggtggtgcacgcctgtagtcccagctattcgggacactgaggctggagaattgcttgaacctgggaggcagaggttgcagtgagccaagatcatgccactgcactccagcctgggcaatagagtgagactccatctcaaaaaataataatttttgggtgcacagctccgtggccataggtggatttggtgctgtgcagccgttgccagtgtgcatatccagaacttgttggccctccccagccgaaaccccatccccattaaatcataactccccactcctgcacccttagcctccagtaaccacctgcctgctttctgtctgtacgaatttgtccagtctgggaaccttacgtaggtggaatcagacagcatttgtcctcctcatgtccttgagcttcacccatatgccgttgtgtgtctgaatttcctccctttctgaggctggatacaatttccctggatgtagatgccacgtctctttatctgcccgtccgtccgtggatgtaggtgccacgtctgtttatccgtctgtggatataggtgccacatctgtttatccatccatccgtccgtgaatgtaggtgccatgtctgtttatccatccatccatccgtggatgtaggtgccacgtctatttatccatccatctgtggatgtaggtgccacgtctgtttgtccttctgtctgtccgtggatgtaggtgccacgtctcttcgtccatccatccgtctgtggacgtaggtgccatgtctgtttacccatccatccgtccatggatgtaggtgccacatctgtttatccatccgtccgtggatgtaggtgccatatctgtttgtccacccacccgtggatgtagctgccacgtctgtttatccgcctgtccatctgtggatgtagctgccatgtctatttatccatccgtccgtggatgtaggtgccacgtctgtttatccatccgttcgtggatgtaggtgccacgtctgtttattcatccgtttgtggatgtagctgccacgtctgtttatccatccatccgcggatgtaggtgccacgtctgtttatccatccattcatggatgtaggtgccatgtctgtttatccgtccgtccgtggatgtaggtgccatgtctgtttatccgtctgtccgtccgtccatccgtgcacatttgggttgtttccacccaaaacgctcttgcctttcgttgagaaaaagaaccttgtccctgaggatggagacagcacagcctccttctctccagacccaagctctgtcccccacctgcctcccagctgtaatagatgagcaggacccgtgaccctagggcatgactggtcactattagtctcctgtagttgaagcacacagttgggccccctgcctcggccttctctccccctcccggccaagtgtccctgccccttgaccccttcacccttcttcctgggtcagctctttcctcccctggtcagtggtttaggtgcatcgaatgcagacgcagtcaccctgaggccgcgggaacaacctctggtcccttgacttcttggcatctcagtttcttcttttatttatttacttatttatatttatttgagatggagtctctctctgtcgcccaggctgagtgtaatggcgcagtcttggctcactgcaacctccgtctcccgggttcaagtgattctcctgtctcagtctcctggttagctgggattaaaggcgcccgccaccatgcccagctaattttcgtatttttagtagagacggggttttgccatgttggccaggctggtctcgaactcctgaccttgtgatccacccgcctcagcctcccaaagtgctgggatgacaggcgtgagccaccgcacccggccaagtttctttattgattcagtgggggtaactattcctaccccaccttcagcactggcttaaaggatctcacatacctggaagagccagtcggtgctgtgacgtgtgcgtccacgctttcacctgttcactcacttgtttctgtttacgatacatcctctgaatggcaggccctgggctgtgggtacaaagaatgaccaggacctcaccgtctggtaaagaaaacaagagaacttaggccaggcacggtggttcatgcctgtaatcccagcactttaggaggccgaggcgggcggatcatgaggtcaggagttcgagaccagcctggccaacatggtgaaacgccgtctctactaaaaatagaaaaatcagccgggcgtgatggtgcgctcctgtaatcccagctactcgggaggctgaggcaggagaatggtgtgaaccaggacccaggaggtggaggttgcggtgagccgagattgcgccattacactccagcctgggctacagagcgagactctgtctcaaaaaaaggaaaacgagaacttggatcgttagccagtgttgccggggttttgaggccagacagatcttgcggggctgagtctagctttctccatcgttagttgggagaacagagcgagtatctttgcctctgagcctcagcttcctgacctgtcagatgggctgtaagaggactgaatgtgagggtccatgaaaccctggacccggggcctggcatggagtcagtacgtggtttgccctaagctggcgggttcaggcaccctgtcccccacccccttccagtggttctgggtgtcacttgtccagcagccccctcctaaaggctgtcacctataagtggtcccctgggtcggggcctttggctggccgaggcagcattattttcttaagctgatggggtcagactggctttgctgaaccaacctcatagcaggggcggggaagtcaaggctggggccctcaatgccggctggcccgaggtttccctgccatgacccagcacggcagctctgagcttggcctggtgtggtcggaaacaaggggcctttgtcagcggctggggagcagcttctggtttcaattactctggagagcacgaggaagcttgcagagaacgtggggccggagcccgccagggcaggagtcaagggctcccctgccccacttccctccctctgacccccaaggggtgtcttgtccccattcgaccctgcctgagggtcctgcgcgtgcgtcctgggggccctgggttgtgagcccagagccccttccagctccggccccctctcgttcttcatagtggtactgggacccctcccaggaagatgatcgacggccggtaacgtgggtcctcagtgcttccccgttccaggcctcacgcgtgggccacactgaccacagccgggcccctggccctgagggaggccttgattcaactgggaaggaacacaggcctttccctttggttccatctctcccgtccccaacccctgccctggcactcacagcccccatagctccctgtcgtgggacaccggagtgacctctccctggaagatcagcccgcgtcggcgcccgccaaggccaggagtgcatgtcaggccccgcctcggctcctggcttaggagttccgcctccctgctgcttgccaccctcacagctggcccacgtggggctcttccctctgccgccacccccacccctgtgccagttccccaggcacatagggaccgtggaggctgagccccaggcctggttctacttcctgctgactctccacttcctcccagggccccgtgactgcagccattgtcctgctctggccctgcccaccccagctgtttcgggcacatttgttctccagcccagactcccacctgctgtccctcttcaaggcaggtctagacgcctggttctccttggagagtgggcagcagagactgtcctgggtgggggaagtcgggggagggtccctcgagagtgcctgccctgccgtcgaaagcttttccaaacgtggggcacgaacctctctcgtcagccctgctcagctgcctccatcgcccaggtgttcctgattttgggagcctggactctgcccagtggattctgggcaggaagcatccagcaggaagcagatggaggtgtgagtcggctccccccgctcccctccacccctgggaagtgccgcctcagcaggcaggcttggcgcccgctccccctgacccgcctctgaagggtgggcaccatgcagagaagccggtccagacaggacctcaggagccgatgcagtcaggccctgagaacatccagcctcccgacagaccaaaaaaaggtgttctcagctctgggtgccgggctcccagactcagaggcacgggacctgggtttgatcttagccggccaacctcgggtgacccttcagagagtgtcctctcgggtccgtggcattcagcgaactcgccgaggcgaaagccgcagacatagattcctccccgtgagccgctaacctccctgctggcggaggctgctgcttcctcctaggaatccaaaggatcagctccagggttgtcccactttccgtgttttctgaaagcttcaagagaaggatgccacagaagggttgccagagaatttcttgagttagggctgaggctgcagatgaatgctgagcgggggtcacctttagggtgggctctgctggcctccctcaagcctgcggccaccgcagactcacagcagcccctcgtggccagccccgcccttgccgtggcctgggggcgtggacattggtggtgctgggcgagggtctaagccccagtgtagcctgtagctttgggctggggcagggagggatgggcacaccgtgttcacgccctcggaggcaagtgctgagctgccctggcttcaggaaagaccctagcgcggctggagacgcaagatgacccagacacacccgcctgacccactagacaggtgctgtcccctctcgaggctgccagggcgaacccacagccactgagcaaaagccctgagtttcccaaaggagggagagaagcagagacacgactggagctgcaggttcagcgtctgacccagaggtgtccttacaaagcccctaatctctcagacccccacgtcccccaccccgagggagagcgaggccttcgggagaactgcctctaggagctgctgggaacctaaggtttgagctgtagatgcctgaaaggagggcggggcgctgaggtgtgcctcagattctgcctgtggggcgtgggaattccggggagggacgtgagccccaaggcaggcgaggggtggtggaaaagcaggtgtgagccagtgggccccacgtcccctcttcagccagggcgcctgctctctctgcttctgcttttatccgacgaggtgggcagggagacgtcggcataaaatttcatttggaaaaaacggcaggggtgcgtcctcagcagaaaagaaatctcaccggagaccatgtgtctgttccgagctcctgatttgacagctgtggaaactgaacccagagaaaaacacagccgttgagtccacaggtccctggctcccagggctttgcttctggccaccatgagctcggagcttgggtggaagggaggtgttcgggaatccagaatgaagaaagagcagggaggctcggcgaccccatcccaccttcaggcctcagcccctcctgcctcaggctgcaatttatggctgtgctgggagacccggccacaccccctccttcccgggaggaggagcaggcaagcagcccaggggggctccagcggtagggacagcatactgaggggccacgccctgcccactctgtccctgggtgagttttgttctagataagcaagatgttcccaaaggctcaagtgcatttttcacccttttccatgaccaaatgtgctgtgagaatcgctagggtttgccagggacgggctgtcgggacacttctcctgcagcagacaagctcttgggctgtttcagcctctcctccgtacctagaaccaccgagcaccctggcgacaccagcctgacgtggccagagagaggctggaggtcaggcagagggaggctggagctgtgtgagaagcagcacgtactcgggactgccctatgagccggcacaggcctttggggagttgggaggacagcaggttaccttgggcaggcctaggtctgggccgtagagcaactgatttcatcctgactgccttcttccttacactgtgcccatcttcaaccttgagcccaccctggacccctctcccagccccacctggatggatgggtgggtgggtggatggatggatggatggatggaaggatgggtgggtgggtggatggatgggtggatggatggatggatgggtggatggatggaaggaaggaaggatggaaggaaggaaggatggaaggaaggaaagaaagaaacaaacatagctcctagggtctaatctgccattggctgctgggtgactcctgtccccaggctgaatgcaggctctgaacattgcaaatacccagaggtatccgatgggtggggagaaaaacctagagtgagtctcagtgtctcattctgggaagacatttggccttccagtccgcaggttttggttagggtcggtacaggaaatggtcagaacacacagtaagaatgcagtgaccacagagccaccgagttgggggacactcccgtccccactcccccacagctgtccccggaacgtgccatcctcccgcccaactcgcacgccctgtgtgggcgctgggcaccccgggctcccatgctcggcctgcttgtctctctctcatcctggagcctgcacctgtctttgggcaggagccactggcaggctctctgcagcccccaaagcctcgggtccgccctgctctcctccagcaccttcttgccccccagcctcgggtccgccctgctctcctccagcaccttcttgtcccccagctctggtcctctgatgcccagccggtgccctgatcctctggtgctgagagagggagtgttcttggcagacctgagccacatcccctcggtccccatcctcagctgggtgccaggctcctcctgggctctggactctctgggcggcctcttggggctctccccgccccaactggctcccaggctatccccactggggcgcctgtggccttggtctagctggctgctcagaaaccccctctcctggagtcatttgcgctagcggataggacgaggaatcggggttcaagtgtgggctgggggagaggagcgtcgttctggtgggaaaaaggaggtcactccaggaaagcggcagctgcatttctaggttctgaggcagaaccttcctcctggtgctcacaggctggaggatttgcctggaagccgtccccacccccagctgtcaccgaggcagccccactgcagcctttgcccctcccgctcgcacagggcaggatgtgaccttttttcctcgttgatgccgccactgaacaccttaacccgattttacctcagtcacagctgtgctgggtggcatgaccccctccctaggtgtaatgcggggtcccacccacgtctccccggggacagcccctctcactccccttgcagagagcctggggaggggctgagggaggatgggatggtccactaggaatgtttttaattccaaaggcagtgacatctgttcgtgggggccttaccaccaggctctgtttatccagccgggggagtcttgcaggtcgtctgaggagggctctggcaggtgtgggggatggaaggggtggggggagcaggtgtgggggatggaaggggtggggggagcaggtgtgggggatggaaggggtggggggagcaggtgggggtagaaagggtggggggagcaggtgtgggggatggaaggggtggggggagcaggtgtgggggatggaaggggtgggggaacaggtgtgggggatggaaggggtggggggagcaggtgtaggggatggaaggggtgggggagcaggtgtgggggatggaaggggtgggggagcaggtgtagggggtggaaggggtgggggggagcaggtttaggggatggaaggagtgagggaggaaggagagtggccccttcccaggtggttgggatagcctgagctgaacccagcagagatgaggaggggtccgtggtgggctgcagcgactagaattcagacttctgcttttgctggggacatctgtcttgcacagatcttcttccacccaagaccattgactccaggaagcaatgagtcgggcttgggggagagaaggcaagtctgcgctgtccccagaggaagcccccagtccatagggaggaagggaaagatgagcgtctcaggggaagactcccaactcggctacccatctgcgaaggcacttatgtcaccatggagaccagctggccatcgttcatccagtccgagcttgctttacctagacaagtattgagcctgtggtacctaagacagatgagtgccgggccttgggaacgggattcacacggcccccttctcccccacacccggcggcagggaggggcgtgcattctcgcagtctgcaccctgtggcctgggacccagcccgagggaaggggaccataggccagtgaggggccgattctgaagttaagtcacggcaccaggagcactgtggcgcaaacgtggagagcagttataatggcatcctaccagccagttacatgacagccattgcacgtttgctggagggaggtagagtaaagctgggacccagtgagggtggatggcctttccctacagccccgagggccccacgctgacccctctcctccaggaagccttccccagttgcctccagctggaaattgtatctctcgatgttcgtggcattttgtctgtcctgttctgaggccgtaatatgggattttgtgcgggttttgtccatctgggcgtggtgcctagtaggtgcacaagtgacccgtgccaaatgcacaaatgcttgtctgcctcctgttgatggacatctctgctttcttggctgcccctttgtcaagcactgacttttgattcgtctctgtgatgccttaacccccaccccagggtcgggcacgcagccaggccctcagtcactacctctagagtgacatgagtggggccaggtgcagtggttcatgcctgtaaacccagcactgtgggaggctgaggtcaggagtttgagaccagcctggccagcatggtgaaacctcgtctctgcgaaaaatacaaaaattagccgggcgtggtggtgggtgtgtgtagtcccatctactcaaggggctgaggcaggagagttgcttgagctggggaggcggaggctgcagtgagccaagattgcaccactgcactccagcctgggcaacagagcaagacactgcctcaaaaaaaaaaaaaaaaaaatgacatgagtgggaccaagcagtggggcctgaggagtgagcagagccttcctggaggagatggctttgtggctgtgtgaaggggctgtctgggtcctcctggagccctggaaggggcaggcgaaggaggggtggagaagggtgactgaggcctcagttaggggacacaggcatgttcctacctccgtccgtctctccacctccccctcaggcggtgctggtgaggctgttgtggctcagcccccacttagcagctcaggtttgaggaagttccgtgtgcaccgtccaggggtgcgtgtgacgtgtgagccaggaagaagtggagctggtctggccgcccctgcagggacagtgaagactgaggcccggttctagcccaggcaggacgccccaaggcccccctccaccagccaggtggaagatagtccagggccagatcctgccacactagggcatcacagtgagtgacaggggtgtgggctttggagttagccagacctccgtttgtgttccagcttgtcctggccttggacacgtagctcagcttgtcagagcccttcgtttcctcagaggtaaagcggggatgctggtactgacttcatacagttgggaggggtaagtgacttaatccatgatgcctggtccctgccagccttccacgaaggacagctctgactacggctgtctctgcagggaagccacctattcctcaaaaacaccaaggcctctgaggagaaatcccgacacctgcctggctggtgacgccggatgccgagggctcgtctctgggccccgacccacctgccttggggtcaaccaagaaatgtcctgacccagctctttttcctgaatccaaagcatcatccatgtttgagtaaggcacagtgcttgtgagcaccaagggctttggagggacctccccatcctcacttggcactgtgtaaccctggcaagaactggacctcctgaccccctgtcctcacctctctagaacagggcagtaacaccaacatgacaagaatgtgaggctcacatgcagtcgggcgtttgaaagacctggttcgcggttgccacggtgcaaatactggtttcctttctgtgccgtgctggggtctgcagaggtccgaggccccagacacccctgggttttgcatagttaaacatttgggattcagcctttctcttttctctgaataccgtactctaacttgcactgttaccttgagacgtaatttgtgtcctagtctctgcggttagaaagttcactaaataaattgaaggtcaagaacaagttcttctctctctcaaggcgcccagcacggacacgggtggttgcccgtggcgtcctctgcgcccagcacggacgcgggtggttgcccgtggcgtcctctgcgcccagcacggacgcgggtggttgcccgtggcgtcctctgcccctggcagcggaaaccttttttggtgaggtgcaaagggccatggttcaaagtgacccctcaagaggcatctctggctggacgtgtgacccgcgtcgtttcgggcttttgctcctgtccctgagcagatcagtgacccgattcccactgggattcccacactaggggtctcctttatccttacatttctcacctgaggaggcttctgagtgccggtccacaagggtctggccgggtcaccaagctggctctgaggaaggtgcctggggcagaagttgggggtggggaagtgcgaccccagggcagtcagagtcttttgcccggggaggagggcagctgtttgtggccaaaatgcagcccccgcctggcccccggcccctccgcttggcccctggagcagcccggtgggcaacacggggacccagcagggagggactggggtgtggggctggtgtaaactttattgcgagggagggcggcggggtcggggaggagcagcgcccttgccagggatgaaacccggggttggggcttggaggggcggccctgggcctgggaggcggcgctcagcctgggctgcagcctcgcggagggcggggaaggagggatgcggaggagggaggagggaggagggacgcggacggagggagggagggaggggagcgcggggagggagggagggagggaggcgagcgcggggaaagccggcgggactagggaactagcgggactggcagccgggactgagcgctccacaggcgccttctctccagcgccgcgtcccgtcccccccggcatgaccgacgtcctgccccagcccgactgcagcccgaaggcggggcgcgaacccctggcgctggaggagtcggggagcaagcgcccccccaacaccggcgcccggctctggggccgcgtgcgcaacaagctgctccgaaacaaggtgcccgcgggggctggaggttccggggggtgggggctcgggggcgctgcggggctcggggggctgcgggggctgcgggggctgatggggtcccgctcccgccccctccgtggagtcccgggacagagctggggtctgtgcgcgtccctctaagtggcttgaacttgatggcgaacgctggggccgcccccacccggaccctggcgctcgggcatctgcccctgcctcgggagaagggaggtttcttctcggcaggtggaccctgctttccactccgggagtgcaaacagcgcacggggagacgcctgcctctgggtctatgtcttgccgccctgttcagcctctacctgatccctgcatccagcgggccttgctggctgcccctttgctgaggggcgccgaccgcagcaccgtctgccgtgtgaggtttctctgtgcaggattgtggggaggggagatgctgccgggtctgggggctcgaggcttcccttcagggaccacccatctgactgtgggcccagtgcccgccgggcaccaggcgttccgtccatgtgccagggcagaccgccggtgcccctgcagccccagacctgagttgggattaaaatctgagatagaagccgactgtcctgcagctgggcaggctgcctcggggctggcttggggccctggcatcaggcacgtgaggaagagccagacccagcgcccagcgcacaggaagtgctcgataactctgcagatcaaatcaactgtccgagttagctgtctcagagtgccagtccggctggccagggctgggcccatccatcaagagagcaacaagggaggccttggccagtccgtggtggggatctgcagctcctcctgaggctcacaggacctctctgcaggctcttactgccagccggcattgaggctcctggcatcagccaggacgaagtgatcttgggctcactggcccctcgttttgtttcagctcctgccatggggcatacttgacctcccagaggtgacatcagccctggaaagtgctgggcagggcagcaacttgagctgtactgcactggcccctgtgtcaccttcagcctccctggggactgggctagcagagccctgctggccccagctgctgccagagcccctctgtgctgaggcagctgtctgtgcccggcagcgtggactcatcccctccccagcccctgctgaggccagcaggcaccagcccagagctcaccatccatccccaaacgtcagggttggcaagaaactgacctggcaggttccgggtccagcgccagccaaacagggcgcttccagtttacctgcccctttgaggaggtgcctggtgggcagggggcaacttttaaacctgaggtcccagactttcagttctttccctatgcatttgtggccggcagaactgagaagccccttcaagaattccttagctgggtttgcctctggcagtgcctggtggctccgtgtctgatggggatctctgggcaggggtggtggccaggcagacgccgggctattgagctgctgagcagttggcgtcagtgcagctcagggtggccccggccctgggctgctctgtgtgacgagcgattccatcccctaacgtgtgctgtgtgccacagtgtgtccgtgtcgtggacgcaggggtcagcgctgtggcggacggagggacgtctgccacagtgtgtccgtgtcgtggacgcaggggtcagcgctgtggtggacggagggacgtctgccacagtgtgtccgtgtcgtggacacgggtcagcgctgtggtggacggagggacgtctgccctgtgcttcccacctcactgtgcgcaggccagcgggtgagcagcagagtcaaagggccaggcctcttgctttctatcctcagccacattaacctggcattttcctgcaggagcttcacagttgggccgaggggctgggactaggcagtttcgtttcggtggggtaagggaagggtgcctggtactgcccagactggcaggagggattgcctcattaactcctcgttaactttgccctgagtgatgctgtgggtgcgagaaacaccggtggccctcctgcttccactgacctgaaggttcattaaaggctggaggcggggcgtgactcatccagggctgggattaaacaatctgttcagatggaaaggtctcatgatcagaactgagcctttaaatagtgcagggcctctggtttctgggggagaggaggcagggacactcacggaggatcctttgggtaccagcgggggtccctgtggttgggctgttcttgtcaccggaggagagttcaggggccaaagcctcattccagcccctgacttggcagtcagctttttgtgcgagtgtttagctgggagacacgtggcatctgggtttgtgggttcagccagggctctcggtattgaacttcgcgtttctacttttctttccttttccctgtttgtttttttttttttttgcctcaaatcacactcaagtagaccaggcccggtgccttcctctccctcccatccttccctcttctagattcttggttgagctttggatgggaaggggctgaattctagattctcgcttgagctttggaggggaaggggctgaaggaggaacccccccaccctgcccccgcagcatccccttgtgggagccgtgaggaggctaagagggcctgaagggaggccggtccagaagcatttgtctgtcggggaagttgaggcccttatagagcaaccaagtccaagacgctcctgacccagaccaggccagatgctggccggcggtggggactcaggctgagccggcagggtgtaaggagattgagtgcagcttcaggtgaccttgtctctgccctgaagcacagccatgtgggtctgagaatcccctacttccaaagagctcctcttaagctggacaccggcactgctgacccccacggtgagtcccgtgttctgtgatgggagctgctgcctttgcttcagagaggatcagaggtgttacctgaggaagggcggggtggagagcccctcttgggccattcggggaagcttcaggctcatgatggtcttagaagaaggtccctttcttggatcacctgatgtcaggagtccaagaccagcctggccaacatggagaagccccgtctcaactaacaatgcaaaaattagccaagtgtggtggctcacgcctgtcatcccagcactttgggaggcagaggcgggtggatcacctgaggtcaggcgttcgagaccagcctggccaacatggtgaaaccccgtgtctactaaaaatacaaaaaaaaaaaaaatagccgggcatggtggcgggcacctgtaatcccagctgctagggaggctgaggcaggagcatcgcttgaacctgggaggtggaggttgcagtgagccgagatcatgccactgcactccagcctgggcaacagagcgagactcggtcttggggtggggggaggaaagggtccctttctttgtcagcttgatcgccaccgcaggacaaccccacccctcacagagcctgtcgtttattccttcttgatggtaccaggtgtgcagaccacgtgcacaccccagaggttcactctaccactcacttggccatcgagggtacacaggtgctgggtacaagatacagatatgtcttgggctcgtctactttattttataatccagtctgggcgtcaggaaagatctcgcagccttctgcaatagaagtctggcctggcccggctgcccaccgcccttccttgtttcccggtgggaagaaagcttcatcgtgcgtcttctctgttcacacacacccccatagcgacccctcagccacagacaggggactacagtgctgcctcccccgagagctggaggcccctacaccagcccacctcttcctgggcctatgtgtgggtcctgactgcggccaggctggctgacaggttggcagtggggtcgggcgaccctccctcttttccacagcacttacccacctgccgagtgggcagacctcactgctggggcctcatgagtactctctgatctctctgccaggccagctcccaagaggcttgcttgagtccgcagagcgggaaccctggactctgagaatctgatgaaggttctggaggccactcagacacagagccaccccatgcacacactgtgtgcgacttcagagggggctgcagacatcaaggcgggaaccctgctctgagtgaacttggcaaggtgccgcttcttggtacctagggagggtagaagggcgctggtcctccccggcctccctgcaggccacagacggcttggccagccagcggtgctgggcgcggtgccccagcttttggatggctctggaccagggagaggagaacctgccaatcaagggggttcctcaaaggccaaagctgcctgagcccagtgttgctgtagtacccagaggcaatgaggccccagacattttggaaggagcccccaagcctgcaggtgtggctgggggagctgccccaggcattttggaaggagcccccaagcctgcaggtgtgagtctgggggagctgccccaggcattttggaaggagcccccaagcctgcaggtgtgagtctgggggagctgccccaggcattttggaagcgcccccaagcctgcaggtgtgagtctgggggagctgccaggtgttggccacagggcgctggtgctggagaggcctggccctctgctgagtggcctcgctcactgcccaggtggttgggaactggtcagcaggtgctgttctttgacctcgtttcccctgtgaactcatgctggggcaggaagatgtttgtgtcctgacggccccccagcaccttcgaggaacagacagtcccctgcgcctgtgacctgcctgccccaccctggggagaaacgcagcgtcagtcctgggtccagtgagccgtagacccttggccctccaggatgggccctggagaggcgggaggggcccgtggagctggtcctgggcttctgtagagaggccaggaggccccaggatccccacagagacttccccagtcccgcttcaagacagcggaaccagctcctgagccgaaatctggagggatctcctttctggaccgtgaccccagccggggctggtaccgatgaccggcacagccagagccgtgacatccacagcgcccttcccatccgatgcctggatgccgtggctgtgctcggggaggcctccggggtccccagcccctcaggctcatgtggcacaaggtgccagagaagacagggcgccaggccggtgggagtcaaggtttcccatttttctcgtctcagtctgctacttaactgctgtgtgcccgcgagtacatccctttgcctctctggttctctggtatcagctcaatgaaggagctgaacaggatgatctcctggaatccagttcatgtgatgatcttggccatgtctcaagattcctagtcctaaaccttaaaccctgagcaccctgggagagtctgtcacagggctgcacctgggccaatgccagccattcagtggacacgggagcagggggtttagtgggaacacagggcttcttgagccctgtcctgaagcagccccggcggggagccattgtcacctccttcccccatgccccagttggttcctctggcctgtgagtattgccggagcaccttccacgtgccaggcctgcaggaactagggacacagaggcgcccgagacagacgagaccctgtctgcaggaggagtccgtcaacaaatgagatccttgccggtcagatgagtgctgtgaaaaaaataaacacaactgggtaacgcagtagagagtgacggggggatgcctggcttgagaggatcacttttgaacgaagatttaaatgacaagaagaattcagccataaaaaacctgggggcagtgcattccaggccaaagaaccggcaaggtccacaccccgaggcaggtgtgctcagaggcagagggggacagtgtggggcgttacgtggggtcaggggacggcggccaggcgacgtggggccctgcggttcaggacagggcctttaatccgaatgcagtgggaagccgcggggtgttcaagcacagttctgtgacgatatgttttgaacacgtactgtacgaggcatcattcttagcctgtgacgcaactgaggtgacacttacaaggtgctgttattcacactgtttatttatttatttgtttgggttcttttgtttttgtttgctgttgttgttttgagacagagtcttgctgtgtcgcccaggctggagtgcaatggcgcgatctcggctcgctgcagcctccgcctcccgggttcaagcgattctcctgcctcagcctcctgagtagctgggattacaggtgcccgccaccacgcccggccaagttttgtatttttttttttttttttttgagacggagtctcgctgtcgcccaggctggagtgcagtggcgcaatcttggctcactgcaggctccgccccctggggttcacgccattctcctgcctcagcctcccgagtagctgggactacaggcgcccgccacctcgcccagctaattttttgtatttttagtagagacggggtttcaccgtgttagccaggctggtcttgaactcctgacctcaggtgatccacccgcctcagcttcccaaagtgctgagattacaggcgtgagtcactgcgccaggcctaaatgtgttttgaattttgttttacatttttaattttttttttttttttttttgtgggagtctcactctctcgcccaggctggagtgcagtggcaccatctcggctcactgcagcctccatctcccaggctcaagcaatcctcccacctcagcctcccaagtagctgggtctacaggcatgtaccaacatgcctggctaatttttgtattttttgtaaagacgaggtttcgttatgttgcgcaggctgatgttgaacttctggcttcagtggatccacctgcctccgcctcccacagtgctggattacaggcgggagcccccgtgcctggcccagactgtttttatatatgaggaatgaggctcagagagtgactcagatgaagtcacgtgagtggcttagccgaggggcgacgttcagaccccggccactcagcctcagcgcaggctctcacccgcggtgtcctgccttccgtggccggttggggttgggctgcgtgccccagatgggagcgtctggagacgccgggctcctgcccgtcaggcatcagtgtggtgcccgtcctggcacgctgtgcatagcaacaggcaagacggttcttctcgacgacgccactgaacgtgagactcggagcaaggcaaggcctgggaggggccgctcagagctgacctgggccctggaattgctggagcccctcacgtccccggcagcaagctccatgcccagaaagtgttctgggcccgggcagggagggtgaagctggtatcagagaaggctgttgatgctgctttttttttttttttttttttttttgagatggagtctcgctctgtcgcccaggctggagtacaatggcacaatctcggctcaccgcaacctccgcctcctgggttcaagcggttctcctgcctcagccccctgagtagctgggtttacaggcatgtgccaccacgccggggtaatttttgtatttttagtagagacagggtttctccatgttggccaggctggtctcgaactcctgacctcaggtgatcctcccacctaggcctcccacagtgctgggattacaggtgtgaaccaccgcgcccagccctgttaatgtttcttaaccactccaggtccagctcgaggcttcagagcccatggaggtctgacaggtccttggccttcccgtggcctccagcgtgaagcttcctggtcaggaccacagaaggcctctcatcttggactttgacctctgagggcgcccctttcctttcaggacagggcctccgtgttgctttggccctggcctgttccttttctcaagagggccccactgcccctgcccttgccactctggcatcctcgacctgccctgggctggggcagggccggcttcctggctggtatttgtagcccagttctgagctgaagctgaagcctccaggctgcctgcacagggaggcagtggtggggtgggctggccctgaggaagacggagccctaggccgctgggggagatgtgcctggctgtggggcctccaagagcagcccaggtttggattttgtctgcttctcctcaaggtcagccatgcccagcccgggggctaaaagcaaagtgggtgccagggcaggcagaggctctggagtggacgtggggccggcagaggcgctggagtggacgtggggccggcagaggcgctggagtggacgtggggccggcagaggcgctgtagtggacgtggggccggcagaggctctgcagtggacgtggggccggcagaggcgctggagcggacgtggggcaggcagaggctctgcagtggacgtggggccggcagaggctctggagcggacgtggggcaggcagaggtgctagaatggacgctggggaaggcaggttgctgcgggtgctaagaggctagcctgccttggacaaaagcgtcgttcagagctgctaatccccttcctcccatgaggcttggggaacttcgaagttctctggtgttggaggggaagccagccgaggccctgggacacggcatcagcccgagcctatctgtggctggcctgggtatggcaggtgggcacaccttggctgcaggacaccttggctacaagggagcctggctgaccctgcagggtgagggctggagaggcggagcctgcctggcctagcagtgtggatgccaagccatgggaagatgtgtggagagtttatggagcctggcccggtgtccccaacccagctgctgagctggaagccaggggtaggtcctggcagcccctccctctctgccctgcctctctcggagtcgctcggagcagtcacgttgacggaatcctccggcgcctcctcgagggaggagaggcagggtcttggcaactcccgtctcccccgttgccagcttgccagccccgccgtgcctctcacgcctgtggtctgccccaatgacaggccggcttcggtgtcccaaggggacccagccctgagcgtggggctgcccttgggggagggcaggggaaagccagcccgggctgccaccgtggccgctggcctgggagccccaggaaacgtgcccaccctcagacccgatgcctggctcagggcctgggctccgcggcccctccagggcaggcgtgaaatgtgcccacacagctccaccttccacgtggttccctgtccgggggccacttgcactgaggtccttctggagtcattttctgtttttttttttttttttttgagacagagtcttgctctgttgcccaggctggagtgcagtggtgctatcttggctcactgcaacccctgcctcccgggttcaagtgatttccggctaattttgtatttttagtagagatggggtttcgtcaggttggccaggctggtctcgaactcctgagctcgagtgatccgcccgcctctgcctcccagagtgctgggattacaggcatgagccaccgcgcccggctgggagtcattttctagcgttcctgtcccacctctcaggaacagatttaccacctttgttgtgaagaagcattttttttttttttctgccgccaggctggagtgcagtggcacaatctcaactccggctcactgcaacctccgcctcccgggttcaagcgattctcctgcctcagcctccccagtagctgggattacaggcacccgccaccacgcctggctaatttttgtatttttagtagagacggggtttcgccacgttggtcaggttggtctcgatctcctgaccttgtgatccgcccgcctcggcctcccaaagtgctgggatgacaggcgtgagccaccgcacctggctgaagaagcacttttttttatgaacctctgcaaccccctctgagggaaaccctcccgcattctgggatgccggggctcagagggtggagggtagaagagcgccagccgtgagaggcaggatggggcggcccccgagggcagggctgtgcctggaggcagggctcctcggggggtcagctcctgggcggtgggagtgaccgagtgggctcctgagggaagcggctttcaggaaggaggcggaggcctgggagctcttggggccctggcaaatgtggtcttcagattcccgtcgtccagtgagcccctggatcacgtcctgagtggcgtccactgaaggctgcttgggacctctgctcccccctccactgagacccccagtggccagttctaagtcccacctgccttgggcagggccaccacaggccccttactgtggattaaagggccctgggtgagggcttgtgggaggggaggtggtggaaaccatctccgaagaccttggggcgagctgcgtgctggagtggagagtgtggcccagcaggcaggagcactgggttggaatgggggctctgccacctccgagggagcaggagtggagaccggagggagcgtgcccctgaatccgagcacggggagctggccgggagcagccctccgggcagaggcaggagaaatggggtcacctgccccagggggtgagaggtgagccgagaggaagggctgagaccctcaggggcatccccaggatgttcctgaaactcagccctggaggacgctcaggtgtgcgtggagcaccctctgccctggagcctcaaatcctctccccgctgcggggccactttgctgattcctgccccaaacatgaggtcacttcggtccagaaaggcgaggcgacctccaccagccacctacgggattcttggcagagaatccacgctcaccttcgggtcttcactcctgctccctcggaggtgacggagccccatttcaacccggtgcccctgcctgctgggttttcgccgcaggggacctggtcgtctcctggacatgagcccccagcgccagcgtttctctttgggagaggcctgaatgcgcagtcatgatttgaccaggcgaagtgcccagacaaagagaaaacagtcggccggatgcaggggctcacgcctggaatcccagcactttgggaggccgaggcgggtggatcacctgaggtcaggagttggagaccagcctggccaacacggtgaaaccccgtctctactaaaaatacaaaaattagccgggcgtggtggctcgtgcctgtagccccagctactcgggaggctgaggcaggagaatcgctcgaacccgaaggtggaggttgcagtgagctgagatcgcgccactgcactccagcctgggcgacagagtgcgactccgtctcaaaaaaaaaaaagaaggaaatagttgagctgctctcagtgaccatgtacggcccagtcgtcgacccctggcccagtcgttcgtccgccttttggctccacgatgttttgcagcctgtttctgtctcctgcctgtggcccaccttggggaggccccagtgctcgtgtgcccctggtggtcttcccagcctgacccttcacgagctccctctgtctccctgcttcaggtgatcagacatcccccaagtacctgctcccctgggcccatggaaggcacctgtctgctgggaccagagggtgagcagtcaggtgtcccatccaccaacgtcccaggggccagcccctccaccccggtgctaatctcatcaggaaatagcacagtccacatttcccaggagttataaatagccagcgcagttgcgggcagcagcgtttctctggaaaatgtacgctgtgcctctccctccctcctctgtgtttaaatgatatcctgaaatagacttggtttctggaggctgatagcctcctgggaaacagagcgtcgttgtcagggcaccgtggggccaggcaggcctctctgagcggataccagggccacacctgcagcaggcaccagggccacacctgcagcagataccagggccacacctgcagcaggcaccaggaagatgtcagggcttgaggggcttacagcttaggaaagtgcccctggcccaggcctggcctcagaaggggctggagtgtgtgagacagcagcaagtgtcgcctgggaggctgcagagggtagatcttagtggagcaggaaggcagagaggacccaaagtttcccactgtgacctggggctctccgagaaggctctctggaggaggcggggcgagaactgggccttagcatcaggaggtgcagtcctgggtcagatgtgcccaggttgaacctggcagctggagcggaagtgatgggcacgaggcagcgggagggctgtactgggggtggcctcccagcaccaggtctgcccaccgggtcgggacacacaccaggaggcccgatgttgcctttctgaggaagcagcagttacagcagctgcgggtcatggacttcacacattctgcagtttcagcagagagggtgctgggggccttgattttgaaccccagctctgacttcctaggtgtgcactgggtaaattcctcactctcgttaagctgcagcatcctcatctgtgagatgggagcggctatgagagcttaaaccgcatatgtctgctatcatgatcatgaacgcagatgctgtgtgtagaggattcatcagtgtcagacttgcaggaagagctcgagataagtccgttgctctcactcttccataacagccctgtgagtcaggtgtggatgcctccatgaggaaattgaagttcacggaggtgaaaggccttgcccgagtgcgcacggttgaatgggagactcagatcagcctgcctccaaatcctgcacactccccccgaccaggttgtgtccaggtccccctgagacttgggaagggaccattggctcagcttcctgcagaagctgccaggaggcacccagtcgtgggaagctggggcggaggaggggctgtgggtgaatcggaccaggggccatggaattggcctgaggcttatgctgatgtgtggagagacctgcctcaagaaggggtggtctcaaaacatcgaactgcgccccataaatacatacaactgcaatgtgtcaattaaaaaataagggcccgggccaggcgtggtggctcacgcccgtaatcccagcactttgggaggccgaggtgggcgaatcacgaggtcaggagatcaagaccatcctggctaacacggtgaaaccccgtctctactaaaaatacaaaaaattagccgggggtggtggcgggcgcctgtagtcccagctactcaggaggctgaggcaggagaatggcgtgaacccgggaggcggagcttgcagtgagccaggatcgcgccacagcactccagcctgggcgacagagcaagactccgtctcaaaaataaataaataaataaaaaataagggcccacacagtggtacatgcctgtaatgccagctcttcaggaggctgaggcaggaggatcactgaagcccagggcaacatagcagcctggacggcacagtgagaccctgtctctagaaaaataaatacaggccgagtgcggtggctcacgcctgtcatcccagcactttgggaggccaaggtgggcggaccacctgaggtctggagttcaagaccagcctgggcaacatggtgaaaccccatctctactaaaaataaaaaaattggccaggcatggtggctcacacttgtaatcccagcactttgggaggccaaggtgggtgggtcatttgaggtcaggagttcgagaccagcctggccaacatggtgaaaccctgtctctactaaaaatacaaaaattagccgggtgtgatggtgcgcacctgtagtcccagctaattgggaggctgaggcagaagaatcggttgaacctgggagacgggttgcagtcagccgagatcacaccactgcactccagcctgggcaacaagagtgaaactctgtctcaaaaaaaaaaaaaaaaaaaaaagagggcatggccgctccagaatgtttcttccaagggtagcatctcagttgacaaagagcatttgattcctccaccctgtgtggctactgctgggggacagagctggggacagacccaggcccggctccgtgtccagacgagatgaaggaactacgagggacagcctgtgtgatccaggagggtttgcaaagaacagaagcagcttagaggggagagaggtttcgggaaagtaaggccagagctggggcttcctttgagaccctgtaggacccctgcctccagccgggctggtgatggcctcacgcttcccgtgtgtgaagaggtgcccggagcagtggttctccctgaggggcacttggttctctgcacacacccaacttctgtctcctgttctgggttccatcccttctctgggcagggcgaacccagtgcagacccagaccccgtcggaggcttgggtaccacctgcccccagccggtgtgtgggtgatagatgtgggaaggacctacatcgagctgcaggaagcccaaggctgacccagatccagtttcccttccgtgatgacagtggcctgttatagcaactgcgttcaaaccgtggcacgcacacctcagagtgcacagagacgttctgagggcgacgtgggcaggagagttttcaggaaatcagtttgcagattctcagctgccataggtgctattgccagaaagccatctgcctgagagccagcatctcgccatcctgtcctctgcagaggagaggcctgaggctggctgtcggggcttggcccggggtgcgcagacctcctgggtggggaacagaggggcttttagaaatgttggggtaggggccaggcatggtgggtcacacctgtaatcccagcactttgggaggccgaggcaggtggatcgcctgaggtcaggagctcgagaccagcctggccaacatggtgaaaccccatctccactacaaataaaaaattagctgggcgtggtggcaggcacctgtaatcccagctactcgggaggctgaggcaggagaatcacttgaacccgggaggtggagcttgcagtgagccgagactgcaccactgcactccagcctgggcgacagagcgagactccgtctcaaaaaaaaaaaaaaaaagaaacgttggggtcagtgttcagaaagtaaaagactctagtggccacttagaacctttcaaaagtcaggtggtatccagttctttgccttccacaaaactgatggaggactcaattttcaactgagagatcatttcaagtaattttcagtaataggtatatatgcgatttaaggcggatagcatggagagaggttaaagaatggtgtaacgcggctgtgataaaactcttttcgacctcatctacttctttatgtgaacaaaatgtttcattgttcacatatttcttgttcattttagagacatggtcctacattgcccaggctggtctcgaactcctgggctcaagtggtcctgtggctgggagccacagcacctgcacatctttacaacaaaaccagaaacatgaaccaaattgatgctgagcctcgtttcactctagcaaaaaataataccctatagatacgcgaactaaagcaaaaaatgttccgcccatctcattgagagagcattccaccaaaaagttactctgctacttaatatttattaaaatgtataatgaggccaggcgcggtggctcacgcctgtaatcccagcactttgggagaccgaggcgggtggatcacctgaggtcgggagttcgagatcagcctgaccaacatggagaaaccccatctctactaaaaatacaaaaaattagccgggtgtggttgtgtgtgtctgtaattccagctactcgggaggctgaggcaggagaatcgcttgaacccaggaggcggaggttgctgtgagccaagatcgcaccattgcactccggcctggacaataagagcgaaactctgtctcaaaaaaataaataaaatgtatataatgtgtcggcttactttttttttttttttcttgagacagggtctcactctgtcgccaggctggagtgcagtggtgtgatcttggctcaatgcaacctccacctcctgggttcaagcgattcttccatctcagcctcccaagtagtagcttggactacagtgcccgccaccacacccggctcacttttgtatttttagtagagacagggttttgtcatgttggccaggctggtctcgaattcctgacctcaggtgatccaccagcctcagcctcccaaagtgctgggattacaggcgtgagccaccgtgcctggctgtctttttaattatgtactgccaatcatggtactaactaatcctgaatatattttgaatatttggagccttgtggtctctggaaatttttgttttcaatgtatacagattttttttgtggaagcaaaatgtaatggtgaataaaggacttgaaaatataaaaatataaactaggacaacattctttaggagaaatggaatagaaacaaattcaaggagagaagatccaggagctctgtgagggaaagaagagcttgtttgtgtagttttttgttgttgttgttttttttgagacggagtctcactctgtcgcccaggctggagtgcagtggtgtgatctccgctcactgcaacctccacctactgggttcatgccattctcctgcctcagcctccccagcagctgggactacaggcgcccaccaccgcgcccggctaattttttgtatttttttttttttagtagagacggggtttcaccgtgttagccaggatggtctcgatctcctgacctcgtgatccgcctccctcggcctcccaaagtgctgggattacaggcatgagccaccgtgcctggcctgttttcttaatattgaattttgagagttttatataataagccctgaaattgggtaatattagccctatagctgtgttctttttcaacattgtttagatgttttttctttttttttgagacggagtctcgctctgtcgcccaggctggagtgcagtggcgcgatctcggctcactgcaagctctgcctcccgggttcacgctattctcctgcctcagcctcccaagtagctgggactacaggcgcccgccaccacgcccggctaattttttgtatttttagtagagacggggtttcaccgtgttagccaggatggtctcgatctcctgagctcgtgatctgcctgccttggcctctcaaagtgctgggattacaggcgtgagccgccacgcctggcctcgtgtagtttttaaatggatgagtgtgggtatcacgtcgctggggtatttagatcccactgaatccatgagaaggaatgatgtcacacttttattttaggatggcaatattgacatgattttggaaatcatactctttgcaactatttaaacttggaaatgttcagattttgacttcagaaagtgccagggagcgcacagttgctcagaattagttcgcaggtgcacaggcagacgggcgcgaaggcccccgagttacagaaacagaacgtggaacagtcctgtgtgagggttgcctctgacctcccctggggtccgcacctccctgggctccagcccgagcctggggacttcccctgtggaggatttgcttatttgggagccaatggcttgacccaagttttctccctgaatcttcccagcaatcccagggaggcaggttctgttgcagatggaataactgaggcttagtgagtttaaaacttgccaggattcaaacccaggcagcctcctgtgcgcgggctcctgactcttcaacacctccacgtggatgggctggttccctcctgatggacttgagcgcctcctaatcaggtgcttaccttttgtgagcctcagtttctgcatctgtgaaatggggtaataatacccatgtcccgggctggcagccaggagtgcctaacagggtgtgccctgcctcccccacggtgggtaacagagtgtgccctgcctcccccacggcgggtaacagggtgtgccctgcctcccccacggcgggtaacagggtgtgccctgcctcccccacggcggccacaggggcctgggggctagggtccccccaaagggttgatttccaggtaaacatcagcttatcccagctgctcacttccgccttcctgactgtgtagctggctctgagcagtgctgacccacggggagatctctggcttggcctccgagctggcacctctctcacccacattctctctctgcagctggacccacaaaccgtggagaccaagaactggcacacggacgtgattgagatgaacggggtgagccggggatgggaatgatcagtggcgtgagccgggaggtggaacgtctgtgcagcaggtgggcagcccggccctgtggctgctcctggggccgctgtgccgcctcgacctccccgcagcccagccccctctcccctcctgcccacaccctgcccgctgctgtcctgcaggtgttgtgttgagggagacctgggtgtgagctagccctcatttgcagtcttggggaggggacccctgtgttttgggggcattcctcgggcactcacaccctggggaatctttacctgcctcaccccccaaccagatcaaagtggaattttccatgaaattcaccagccgagatatgagcctgaagaggaccccgtccaaaaagcagaccggcgtcttcggtgtgaagatcagcgtggtgacgaagtaggtgctgcctcgggtctcccagtcctggcgtcggtgccccgggtcccccccagcccgggccccccagccctccccgccggtgcccatcctggcacctaatcagttaccccccgctcggcggtggcagatggccggtgtggatctagagtggccgcagaggcgctcacaggacacttcagaagcacgcgagccagcacctaaacgctggaaggtctcttgtgagatcccagatcgtctgctcctcgtaacaagcgggaagctctgtcagccgggggcctacgtttgggctcggcaccaacggggactggcggcccctcgggaaagggcacgtgtcccccggttcaccaccaccctggccccttgtctcaggcctgacccacctcctcatgtgggctgcctgctgggcctcctacaagcatctgaatctgggggacgttctttccctagagtctcggccttaccttcccaagttcccaaggcttctcctgcccacgtccgtcgatgccccttcggcaggcctcgggtgggctggctggggtggggtgcggtggcctctttctctgccctgcccctgcccccgccccagctctccatcccaaatgctagaagctctccagggtgtgtgtgtgctgggtgggggttgctacgggagagctgtcgtgggggctgccctccacccatcctcacgctccaccccaggcgggagcgctccaaggtgccctacatcgtccggcagtgtgtggaggaggtggagaagaggggtatcgaggaggttggcatctacaggatatcgggcgtggccacggacatccaggcgctcaaggccgtcttcgatgccagtgagtctgggaggcccagccggggcaggtgtggctgtgtctgagcaggctggtgggatggacaggagagctcgggggaaccaggagcctccctggagaggaggcttgctctgcttcagagtccccgtggcaagtgctttctcttgtaatcccctcccctccaatctcttgtcccttgctgcaggtaagcaactgcagaaactcacaagggccgactcacttgcccaggatgacccaacttgtaggttttggttctggacttaaaactcagatctgactccagtgtctttcttgctagttcctgggtgcctggtgagccgcagggaaagagctttgagcctgcacctgctgtctccagggccccaggtcccctctggggcagtgctgcctctgcgtgaagcccaccatggtgaggcctgacctttctggtttctcctccctgctcctgctggttcaggtgcagcagccacataccccactgtcaagaaacctgcactggccaggcagggatgaatccgtggggagcctggagtggaggacggggtggggcctgggaactggccggcgttggtgcctctgtgcagcctagaagctgaggctttgtcggaacatgcttttacgtgtgaaaagtgtgcaatgccttccagagaggggcttagcgatggagaggttccagtcggaaggaagctgcaggccacatggtatgaatgtggctctgaactctgggtgatggatttcactccccaaacaccctttcccaagcagccacagcagatggcccccaggctatctctccctgttcccccaaccccgacccacagagccgagtcacagacacctgtgggccctctctacatcctgctcttccaggggagaccagaaccagagctggagtgggtgggggctgtgtcaggatgggtcgggggtggaacggggctgctggcccagctaaggctgcctgacctcggccccacccctgcagataacaaggacatcctgctgatgctgagtgacatggacatcaacgccatcgccgggacgctcaagctgtacttccggga
